(19) United States
(12) Patent Application Publication
(10) Pub. No.: US 2013/0189690 A1
(43) Pub. Date: Jul. 25, 2013

(54) SCN5A Splice Variants for Use in Methods Relating to Sudden Cardiac Death and Need for Implanted Cardiac Defibrillators

(71) Applicants: THE BOARD TRUSTEES OF THE UNIVERSITY OF ILLINOIS, Urbana, IL (US); The United States of Government as represented by the Department of Veterans Affairs, Washington, DC (US)

(72) Inventor: Samuel Dudley, Chicago, IL (US)

(73) Assignees: The United States Government as represented by the Department of Veterans Affairs, Washington, DC (US); THE BOARD OF TRUSTEES OF THE UNIVERSITY OF ILLINOIS, Urbana, IL (US)

(21) Appl. No.: 13/841,283

(22) Filed: Mar. 15, 2013

Related U.S. Application Data
(63) Continuation-in-part of application No. PCT/US2012/020564, filed on Jun. 1, 2012.
(60) Provisional application No. 61/557,203, filed on Nov. 8, 2011.
(60) Provisional application No. 61/527,890, filed on Aug. 26, 2011.
(60) Provisional application No. 61/527,916, filed on Aug. 26, 2011.

(51) Int. Cl. G06F 19/12; C12Q 1/68

(52) U.S. Cl. 435/6.11; 702/20

(57) ABSTRACT

Provided herein are methods of determining a subject's need for an implanted cardiac defibrillator, methods of determining a subject's risk for sudden cardiac death (SCD), arrhythmias, or heart failure, methods of determining a subject's need for an anti-arrhythmic agent, e.g., a sodium channel blocker, and methods of reducing risk of SCD in a subject. In exemplary embodiments, each of the methods comprise the step of determining a ratio, R_{S}, which compares a level of a truncated SCN5A Exon 28 transcript of a biological sample obtained from the subject to (i) a level of a full length SCN5A Exon 28 transcript of the biological sample or (ii) a level of all SCN5A Exon 28 transcripts of the biological sample or (iii) a level of a full length SCN5A Exon 28 transcript and a level or one or more truncated SCN5A Exon 28 transcripts. Further provided herein are systems, computer-readable storage media, having stored thereon machine-readable instructions executable by a processor, and related methods implemented by a processor in a computer. Kits are additionally provided herein.

### CROSS-REFERENCE TO RELATED APPLICATIONS

[0001] This application claims priority to International Patent Application No. PCT/US2012/20564, filed on Jan. 6, 2012, which claims priority to U.S. Provisional Patent Application No. 61/430,462, filed Jan. 6, 2011, U.S. Provisional Application No. 61/527,890, filed Aug. 26, 2011, U.S. Provisional Application No. 61/527,916, filed Aug. 26, 2011, and U.S. Provisional Application No. 61/557,203, filed Nov. 8, 2011. The disclosures of each of these applications are incorporated herein by reference in their entirety.

### STATEMENT OF U.S. GOVERNMENTAL INTEREST

[0002] This invention was made with U.S. government support under National Institutes of Health (NIH) National Heart, Lung and Blood Institute (NHLBI) Grant No. R01 HL1024025-01A1 and NIH Small Business Technology Transfer (STTR) Grant No. 1R41HL112355-01A1. The government has certain rights in this invention.

### INCORPORATION BY REFERENCE OF MATERIAL SUBMITTED ELECTRONICALLY

[0003] Incorporated by reference in its entirety is a computer-readable nucleotide/amino acid sequence listing submitted concurrently herewith and identified as follows: 2 megabytes ASCII (Text) file named “46463B_SeqListing.txt,” created on Mar. 13, 2013.

### BACKGROUND

[0004] Heart failure (HF) represents a major health care concern in the United States. It has been estimated that approximately 5 million patients in the U.S. have HF, and, annually, another 550,000 people are diagnosed with this disease (Hunt et al., Circulation 112:e154-E235 (2005)). Not surprisingly, HF is the single most common diagnosis upon hospital admission.

[0005] HF patients have a risk for sudden cardiac death (SCD) which is 6 to 9 times greater than that of non-HF patients, and cardiac arrhythmias are the leading cause of death in HF patients (Roger et al., Circulation 121(7):e46-e215 (2010); Kannel et al., Am Heart J 115: 869-875 (1988)). The “gold standard” for preventing SCD is the implantation of an implanted cardiac defibrillator (ICD). Extensive clinical trials support that implantation of an ICD prolongs life.

[0006] Currently, ICDs are indicated for all patients with a chronic cardiac left ventricular ejection fraction (EF) of less than 35% (Hunt et al., Circulation 119:e391-E479 (2009)). Both the American College of Cardiology and the American Heart Association endorse the placement of an implanted cardiac defibrillator (ICD) for primary prevention of sudden cardiac death to reduce total mortality in patients with nonischemic dilated cardiomyopathy or ischemic heart disease at least 40 days post-myocardial infarction, a EF less than or equal to 35%, New York Heart Association (NYHA) functional class II or Ill symptoms while receiving chronic optimal medical therapy, and who have reasonable expectation of survival with a good functional status for more than 1 year. (Level of Evidence: A; Hunt et al., 2009, supra).

[0007] Despite the wide acceptance and practice of these guidelines, more than 60% of patients who have an ICD never experience and a shock from the ICD due to a lack of need therefor (Bardy et al., N Eng J Med 352:225-237 (2005)). Thus, there are many patients that unnecessarily receive an ICD.

[0008] On average, an ICD, costs between $20,000 and $50,000, excluding operative, follow-up, and complication costs. Also, the implantation surgery itself poses additional patient risk for complications, including major bleeding, pneumothorax, perforation of the heart, arrhythmia induction, stroke, heart attack, need for emergency heart surgery, and death.

[0009] Current methods for SCD risk stratification and determination of a patient's need for ICD placement fail to provide a simple, cost effective, method for achieving this end. Either the method essentially assesses only ejection fraction (EF), and oversimplifies the complexities of SCD risk stratification, or the method is overly complicated, invasive, or costly. While the methods that look at EF do not distinguish well between low risk patients and high risk patients, likely because they do not directly reflect an arrhythmogenic pathophysiological process, other FDA-approved techniques, e.g., signal averaged electrocardiogram (SAECG) and T-wave alternans, are not widely employed, because the costs of the equipment and personnel to implement them are too high. Also, some studies have demonstrated their lack of utility (8-10). Additionally, invasive electrophysiological testing also has been largely abandoned for similar reasons. Because risk can change with time, these more demanding techniques, if used at all, are often restricted to a single assessment per patient.

[0010] In view of the foregoing, there is a need in the art for a simple, inexpensive blood test for determining SCD risk and for determining patient need for ICD implants.

### SUMMARY

[0011] The invention provided herein is based in part on data demonstrating that patients with an implanted cardiac defibrillators (ICD), which provides shock to the patient, exhibit increased levels of truncated SCN5A Exon 28 splice variant transcripts and exhibit reduced levels of full length SCN5A Exon 28 transcripts.

[0012] The invention accordingly provides a method of determining a subject's need for an implanted cardiac defibrillator (ICD). In exemplary embodiments, the method comprises the step of determining a level of a full length SCN5A Exon 28 transcript and a level of a truncated SCN5A Exon 28 transcript, of a biological sample obtained from the subject. In exemplary embodiments, the method comprises the step of determining a level of all SCN5A Exon 28 transcripts, including both wild-type (WT) Exon 28 transcripts, E28A transcripts, E28B transcripts, E28C transcripts, and E28D transcripts.

[0013] In exemplary embodiments, the method of determining a subject's need for an ICD comprises the step of determining a ratio, Rₛ, which compares a level of a truncated SCN5A Exon 28 transcript of a biological sample obtained from the subject to (i) a level of a full length SCN5A Exon 28 transcript of the biological sample or (ii) a level of all SCN5A Exon 28 transcripts of the biological sample or (iii) a level of a full length SCN5A Exon 28 transcript and a level or one or more truncated SCN5A Exon 28 transcripts of the biological sample. In exemplary aspects, Rₛ compares a level of SCN5A Exon 28 Splice Variant C (E28C) of a biological sample obtained from the subject to a sum level of WT SCN5A Exon 28 transcript and SCN5A Exon 28 Splice Variant A (E28A). In exemplary aspects, Rₛ compares a level of E28C of a biological sample obtained from the subject to a sum level of all SCN5A Exon 28 transcripts: WT, E28A, E28B, E28C, E28D. In exemplary aspects, Rₛ compares a level of SCN5A Exon 28 Splice Variant D (E28D) of a biological sample obtained from the subject to a sum level of WT SCN5A Exon 28 transcript and SCN5A Exon 28 Splice Variant A (E28A). In exemplary aspects, Rₛ compares a level of E28D of a biological sample obtained from the subject to a sum level of all SCN5A Exon 28 transcripts: WT, E28A, E28B, E28C, E28D.

[0014] The invention also provides a method of determining a subject's need for an ICD, wherein the method comprises the steps of (A) determining a ratio, Rₛ, which compares a level of a truncated SCN5A Exon 28 transcript of a biological sample obtained from the subject to (i) a level of a full length SCN5A Exon 28 transcript of the biological sample or (ii) a level of all SCN5A Exon 28 transcripts of the biological sample or (iii) a level of a full length SCN5A Exon 28 transcript and a level or one or more truncated SCN5A Exon 28 transcripts of the biological sample and (B) comparing Rₛ as determined in (A) to a threshold ratio, R_{T}, wherein the R_{T} is determined by a system. In exemplary aspects, the system comprises a processor and a memory device coupled to the processor, wherein the memory device stores machine readable instructions that, when executed by the processor, cause the processor to:
[0015] (i) receive a plurality of data values, each data value is a ratio determined from a biological sample obtained from a subject of a first population, wherein the ratio compares a level of a truncated SCN5A Exon 28 transcript to (a) a level of a full length SCN5A Exon 28 transcript or (b) a level of all SCN5A Exon 28 transcripts, wherein each subject of the first population is a subject known as having an ICD that has given a shock;
[0016] (ii) fit the plurality of data values to a first Gaussian distribution;
[0017] (iii) determine a mean value, μ, and a standard deviation, σ, of the first Gaussian distribution;
[0018] (iv) set a first threshold ratio, R_{T}, at μ−Xσ, wherein X is a number between 0.7 and 4.0.

[0019] This system, as well other related systems, related computer-readable storage media having stored thereon machine-readable instructions executable by a processor, and related methods implemented by a processor in a computer, are also provided herein.

[0020] Patients who receive shocks from ICDs are at high risk for sudden cardiac death. Therefore, the invention further provides a method of determining a subject's risk for sudden cardiac death. In exemplary aspects, the method comprises the step of determining a ratio, Rₛ, which compares a level of a truncated SCN5A Exon 28 transcript of a biological sample obtained from the subject to (i) a level of a full length SCN5A Exon 28 transcript of the biological sample or (ii) a level of all SCN5A Exon 28 transcripts of the biological sample or (iii) a level of a full length SCN5A Exon 28 transcript and a level or one or more truncated SCN5A Exon 28 transcripts of the biological sample. In exemplary aspects, R, compares a level of SCN5A Exon 28 Splice Variant C (E28C) of a biological sample obtained from the subject to a sum level of WT SCN5A Exon 28 transcript and SCN5A Exon 28 Splice Variant A (E28A). In exemplary aspects, Rₛ compares a level of E28C of a biological sample obtained from the subject to a sum level of all SCN5A Exon 28 transcripts: WT, E28A, E28B, E28C, E28D. In exemplary aspects, R, compares a level of SCN5A Exon 28 Splice Variant D (E28D) of a biological sample obtained from the subject to a sum level of WT SCN5A Exon 28 transcript and SCN5A Exon 28 Splice Variant A (E28A). In exemplary aspects, Rₛ compares a level of E28D of a biological sample obtained from the subject to a sum level of all SCN5A Exon 28 transcripts: WT, E28A, E28B, E28C, E28D.

[0021] Patients at risk for sudden cardiac death are prescribed a form of an anti-arrhythmic therapy. Thus, the invention additionally provides a method of determining a subject's need for anti-arrhythmic therapy. In exemplary embodiments, the method comprises the step of determining a ratio, Rₛ, which compares a level of a truncated SCN5A Exon 28 transcript of a biological sample obtained from the subject to (i) a level of a full length SCN5A Exon 28 transcript of the biological sample or (ii) a level of all SCN5A Exon 28 transcripts of the biological sample or (iii) a level of a full length SCN5A Exon 28 transcript and a level or one or more truncated SCN5A Exon 28 transcripts of the biological sample. In exemplary aspects, Rₛ compares a level of SCN5A Exon 28 Splice Variant C (E28C) of a biological sample obtained from the subject to a sum level of WT SCN5A Exon 28 transcript and SCN5A Exon 28 Splice Variant A (E28A). In exemplary aspects, Rₛ compares a level of E28C of a biological sample obtained from the subject to a sum level of all SCN5A Exon 28 transcripts: WT, E28A, E28B, E28C, E28D. In exemplary aspects, Rₛ compares a level of SCN5A Exon 28 Splice Variant D (E28D) of a biological sample obtained from the subject to a sum level of WT SCN5A Exon 28 transcript and SCN5A Exon 28 Splice Variant A (E28A). In exemplary aspects, Rₛ compares a level of E28D of a biological sample obtained from the subject to a sum level of all SCN5A Exon 28 transcripts: WT, E28A, E28B, E28C, E28D.

[0022] The invention further provides a method of reducing risk of sudden cardiac death (SCD) in a subject. In exemplary embodiments, the method comprises the steps of (A) determining a ratio, Rₛ, which compares a level of a truncated SCN5A Exon 28 transcript of a biological sample obtained from the subject to (i) a level of a full length SCN5A Exon 28 transcript of the biological sample or (ii) a level of all SCN5A Exon 28 transcripts of the biological sample or (iii) a level of a full length SCN5A Exon 28 transcript and a level or one or more truncated SCN5A Exon 28 transcripts of the biological sample and (B) administering to the subject an ICD or an anti-arrhythmic agent, when R_{S} is greater than or equal to a threshold ratio, R_{T}. In exemplary aspects, Rₛ compares a level of SCN5A Exon 28 Splice Variant C (E28C) of a biological sample obtained from the subject to a sum level of WT SCN5A Exon 28 transcript and SCN5A Exon 28 Splice Variant A (E28A). In exemplary aspects, Rₛ compares a level of E28C of a biological sample obtained from the subject to a sum level of all SCN5A Exon 28 transcripts: WT, E28A, E28B, E28C, E28D. In exemplary aspects, Rₛ compares a level of SCN5A Exon 28 Splice Variant D (E28D) of a biological sample obtained from the subject to a sum level of WT SCN5A Exon 28 transcript and SCN5A Exon 28 Splice Variant A (E28A). In exemplary aspects, Rₛ compares a level of E28D of a biological sample obtained from the subject to a sum level of all SCN5A Exon 28 transcripts: WT, E28A, E28B, E28C, E28D.

[0023] The invention provides a method of determining whether administration of an anti-arrhythmic therapy to a subject will be safe. In exemplary embodiments, the method comprises the step of determining a ratio, Rₛ, which compares a level of a truncated SCN5A Exon 28 transcript of a biological sample obtained from the subject to (i) a level of a full length SCN5A Exon 28 transcript of the biological sample or (ii) a level of all SCN5A Exon 28 transcripts of the biological sample or (iii) a level of a full length SCN5A Exon 28 transcript and a level or one or more truncated SCN5A Exon 28 transcripts of the biological sample. In exemplary aspects, Rₛ compares a level of SCN5A Exon 28 Splice Variant C (E28C) of a biological sample obtained from the subject to a sum level of WT SCN5A Exon 28 transcript and SCN5A Exon 28 Splice Variant A (E28A). In exemplary aspects, Rₛ compares a level of E28C of a biological sample obtained from the subject to a sum level of all SCN5A Exon 28 transcripts: WT, E28A, E28B, E28C, E28D. In exemplary aspects, Rₛ compares a level of SCN5A Exon 28 Splice Variant D (E28D) of a biological sample obtained from the subject to a sum level of WT SCN5A Exon 28 transcript and SCN5A Exon 28 Splice Variant A (E28A). In exemplary aspects, Rₛ compares a level of E28D of a biological sample obtained from the subject to a sum level of all SCN5A Exon 28 transcripts: WT, E28A, E28B, E28C, E28D.

[0024] Also provided is a method of determining a subject's risk for arrhythmias. In exemplary embodiments, the method comprises the step of determining a ratio, Rₛ, which compares a level of a truncated SCN5A Exon 28 transcript of a biological sample obtained from the subject to (i) a level of a full length SCN5A Exon 28 transcript of the biological sample or (ii) a level of all SCN5A Exon 28 transcripts of the biological sample or (iii) a level of a full length SCN5A Exon 28 transcript and a level or one or more truncated SCN5A Exon 28 transcripts of the biological sample. In exemplary aspects, Rₛ compares a level of SCN5A Exon 28 Splice Variant C (E28C) of a biological sample obtained from the subject to a sum level of WT SCN5A Exon 28 transcript and SCN5A Exon 28 Splice Variant A (E28A). In exemplary aspects, Rₛ compares a level of E28C of a biological sample obtained from the subject to a sum level of all SCN5A Exon 28 transcripts: WT, E28A, E28B, E28C, E28D. In exemplary aspects, Rₛ compares a level of SCN5A Exon 28 Splice Variant D (E28D) of a biological sample obtained from the subject to a sum level of WT SCN5A Exon 28 transcript and SCN5A Exon 28 Splice Variant A (E28A). In exemplary aspects, Rₛ compares a level of E28D of a biological sample obtained from the subject to a sum level of all SCN5A Exon 28 transcripts: WT, E28A, E28B, E28C, E28D.

[0025] The invention furthermore provides a method of determining a subject's risk for heart failure. In exemplary embodiments, the method comprises the step of determining a ratio, Rₛ, which compares a level of a truncated SCN5A Exon 28 transcript of a biological sample obtained from the subject to (i) a level of a full length SCN5A Exon 28 transcript of the biological sample or (ii) a level of all SCN5A Exon 28 transcripts of the biological sample or (iii) a level of a full length SCN5A Exon 28 transcript and a level or one or more truncated SCN5A Exon 28 transcripts of the biological sample In exemplary aspects, Rₛ compares a level of SCN5A Exon 28 Splice Variant C (E28C) of a biological sample obtained from the subject to a sum level of WT SCN5A Exon 28 transcript and SCN5A Exon 28 Splice Variant A (E28A). In exemplary aspects, Rₛ compares a level of E28C of a biological sample obtained from the subject to a sum level of all SCN5A Exon 28 transcripts: WT, E28A, E28B, E28C, E28D. In exemplary aspects, Rₛ compares a level of SCN5A Exon 28 Splice Variant D (E28D) of a biological sample obtained from the subject to a sum level of WT SCN5A Exon 28 transcript and SCN5A Exon 28 Splice Variant A (E28A). In exemplary aspects, Rₛ compares a level of E28D of a biological sample obtained from the subject to a sum level of all SCN5A Exon 28 transcripts: WT, E28A, E28B, E28C, E28D.

[0026] Furthermore provided herein is a kit useful for determining a subject's need for an ICD or for an anti-arrhythmic agent, a subject's risk for SCD, heart failure, or arrhythmias, or for determining whether administration of an anti-arrhythmic agent to a subject will be safe. In exemplary aspects, the kit comprises (i) reagents for measuring a level of full length SCN5A Exon 28 transcript of a biological sample and (ii) reagents for measuring a level of a truncated SCN5A Exon 28 transcript of a biological sample. In exemplary aspects, the kit comprises instructions for use, or access thereto. In exemplary aspects, the kit comprises a system or a computer-readable storage media having stored thereon machine-readable instructions executable by a processor, as further described herein.

### BRIEF DESCRIPTION OF THE DRAWINGS

[0027] FIG. 1 is a schematic representation of the splice variants identified in the 5′ end of the human SCN5A gene. The map shows the genomic structure of SCN5A with untranslated (open bars) or translated (closed bars) transcribed sequences and nontranscribed sequences (lines). Splicing patterns for each of the three exon 1 isoforms are identified.

[0028] FIG. 2 provides cDNA sequences for E1A, E1B1, E1B2, E1B3, E1B4, E2A, E2B1 and E2B2.

[0029] FIG. 3 is a schematic representation of the splice variants identified in the 3′ end of the human SCN5A gene. Above the map shows the genomic structure of SCN5A with untranslated (open bars) or translated (closed bars) transcribed sequences and nontranscribed sequences (lines). Splicing patterns for each of the four exon 28 isoforms are identified.

[0030] FIG. 4 provides cDNA sequences for E28A (FIGS. 4A and 4B), E28B (FIG. 4C), E28C (FIG. 4D), and E28D (FIG. 4E).

[0031] FIG. 5 is a photograph of a gel showing PCR results for detecting the transcription start site (TSS), exon 1 variants of the human cardiac SCN5A gene. Total RNA from fetal and adult heart was used to determinate the TSS and exon 1 isoforms with SCN5A specific primers. RACE-PCR result shows total three hands (380, 200 and 100 bp) in both fetal heart (FH) and adult heart (AH) contained cardiac specific Na+ channel sequences. The first band, 380 bp, corresponds to exon 1A, which is reported previously. A second band, 200 bp, is new exon 1 isoform, referred as to exon 1B (E1B) with multiple TSS, whereas the third 100 bp band is an exon 1 isoform referred as to exon 2B (E2B) with multiple TSS.

[0032] FIG. 6 is a photograph of a gel showing RACE-PCR results for detecting the 3′ UTR isoforms of the human cardiac SCN5A gene. Total RNA from human fetal and adult heart was used to determinate the 3′UTR with SCN5A gene specific primers GSP3′. The first two lines are first PCR of RACE product and the last two bands are 2nd RACE-PCR result showing the fetal heart lane (FH) demonstrates three bands, the larger visible band is corresponds to 834 bp short 3′UTR of human cardiac Na+ channel sequences. A second band (.about.1.4 kb) is noted in fetal heart (FH) only, whereas the third band is noted in both fetal and adult heart as 0.25 and 0.3 kb bands. The last band is 0.2 kb, which were detected only in adult heart. The presence of four exon 28 isoforms was confirmed by sequencing.

[0033] FIG. 7 is a schematic showing alignment of the nucleotide and amino acid sequences (single letter) of the four SCN5A transcriptional isoforms. The isoform name and nucleotide base pairs numbering starting at the initial AUG codon are indicated at the left. The sequences start from exon 27 (shaded) and continue to the poly-A tail. Introns are shown as dashed lines. Splicing of exons B, C, and D result in frame shifts and premature stop codons. Methionine at amino acid 1652 is bolded to indicate the site of introduction of a stop codon in the gene-targeted mouse.

[0034] FIG. 8 is a drawing showing the putative secondary structure of the cardiac Na+ channel.

[0035] FIG. 9 is a set of graphs showing developmental regulation of the human SCN5A exon 28 isoforms. The relative abundances of the four isoforms in fetal (FH, open bars) and adult heart (AH, closed bars) are shown in FIG. 9A. FIG. 9B shows the abundance of each isoform as a percentage of the total SCN5A mRNA. In each case, the full length transcript (E28A) was most prevalent. Exon 28D (E28D) was the second most abundant. Exon 28B (E28B) was least abundant in fetal heart, and exon 28C (E28C) was least abundant in adult heart. E28B and E28D were increased in adult heart when compared to fetal heart. *p<0.05 when comparing FH to AH.

[0036] FIG. 10 is a set of graphs showing that C-terminal isoform mRNA abundances vary between control and diseased hearts. Real-time PCR results show that the isoform abundances with respect to the total mRNA abundance in each sample. The changes were determined for the four exon 28 variants in control (black bars) and HF (open bars) patients for total ventricle (FIG. 10A), left ventricle (FIG. 10B), and right ventricle (FIG. 10C). Comparing left and right ventricle in FIG. 10B and FIG. 10C, respectively, shows that the isoform abundance changes are more prominent in the left ventricle. .beta.-Actin was used as a reference in all cases. All mRNA abundances were normalized to one of the normal human ventricular exon 28D mRNA abundances. *p<0.05 when comparing controls to HF hearts.

[0037] FIG. 11 is a set of photographs of gels showing tissue-specific expression of human SCN5A exon 28 isoforms. R_{T}-PCR results shows that isoform E28A and D were expressed in skeletal muscle (SKM), as well as in human heart. All four isoforms were found in lymphoblasts. The .beta.-actin was used as internal reference.

[0038] FIG. 12 is a set of graphs showing a model truncation that reduces cardiac Na+ channel current. In order to test the physiological role of the splice variations, a model truncation was introduced into a single allele of mouse ES cells by gene targeting. FIG. 12A shows cardiomyocytes with and without the altered allele were studied electrophysiologically. Na+ channel current-voltage curves are shown for wild-type (black squares) and the truncation (open squares). FIG. 12B shows peak current between the two cell types is compared. Introduction of a truncation in the region of the mRNA splice variations resulted in a substantial reduction in peak Na+ current. FIG. 12C shows action potentials (AP) recorded in the current clamp mode from a spontaneously beating wild-type (gray line) and mutant CMs (black line). FIG. 12D compares beating rate, AP amplitude, and AP upstroke velocity between the two types of CMs. The truncation mutant shows a reduced beating rate (beats per second), AP amplitude (mV/10), and maximum AP upstroke velocity (mV/ms), consistent with reduced Na+ current. *, p<0.05.

[0039] FIG. 13 is a set of graphs showing multi-electrode array (MEA) analysis of differentiated CMs with and without the introduction of the model truncation. FIG. 13A illustrates representative field potentials (FPs) from syncytial wild-type and truncation containing CMs recorded from a single MEA electrode. FIG. 13B compares field potential minima (FPmin) recorded at day 19. The FPmin was significantly decreased by introduction of the truncation. FIG. 13C shows that the time to FPₘᵢₙ (i.e. the field potential rise time, FPᵣᵢₛₑ) was slowed in the truncation CMs as compared to wild-type. Conduction velocity was decreased substantially in the truncation cardiomyocytes (FIG. 13D). All changes are consistent with a reduced Na+ current. *p<0.05 between wild-type and the truncation.

[0040] FIG. 14 is a set of graphs showing cell viability testing. FIG. 14A: H9c2 cardiomyocyte viability at 48 h as a function of angiotensin II concentration. FIG. 14B: H9c2 cardiomyocyte viability at 48 h as a function of H₂O₂. *, P<0.05 when compared with 10 .mu.mol/L H₂O₂.

[0041] FIG. 15 is a set of graphs showing downregulation of cardiac Na+ channel mRNA by AngII and H₂O₂. H9c2 or acutely isolated neonatal cardiomyocytes cultured in serum free media (SFM) or exposed to AngII (100 nM or 2 nM), H₂O₂ (20 .mu.M or 40 nM), or AngII (100 nM or 2 nM) and PEG-catalase (250 U/mL) for 48 h. AngII and H₂O₂ resulted in reduced Na+ channel mRNA abundance in both H9c2 (FIG. 15A) and neonatal cardiomyocytes (FIG. 15B). In both cases, the AngII effect could be prevented by PEG-catalase (AngII+CAT). *, P<0.05.

[0042] FIG. 16 is a set of graphs showing that cardiac Na+ channel current is downregulated by H₂O₂. FIG. 16A shows representative Na+ currents recorded from H9c2 CMs with voltage steps to −10 mV before and after 48 h of H₂O₂ exposure. FIG. 16B shows that H₂O₂ exposure (20 .mu.M for 48 h) resulted in a 46% (.+−.2.9%, p=0.01) reduction in peak Na+ current. *, P<0.05.

[0043] FIG. 17 shows that mutation of the NF-.kappa.B binding site in the Na+ channel promoter eliminates the effects of AngII and H₂O₂. FIG. 17A shows the relationship of the promoter-reporter fragment used to the mouse scn5a promoter (GenBank AY769981). The top line shows the structural organization of this region of the scn5a promoter (3.0 kb). Note the presence of untranslated exon 1C and part of exon 2, which contains the translation start site. Nucleotide numbering starts with +1 corresponding to the protein translation start site. The construct, APS3, containing the NF-.kappa.B site (.diamond-solid.) showed reduced activity after 48 h of exposure to 100 nM AngII or 20 .mu.M H₂O₂. Mutating the NF-.kappa.B binding site prevented the AngII or H₂O₂ effects (FIG. 17B). Data are presented as mean.+−.S.E.M and are based on 4 separate experiments in both groups.

[0044] FIG. 18 is a set of photographs of gels showing that AngII and H₂O₂ induce NF-.kappa.B binding to the scn5a promoter. FIG. 18A shows an electrophoretic mobility shift assays with nuclear extracts from H9c2 cardiomyocytes showed that under basal conditions (SFM), there was little binding of NF-.kappa.B to the scn5a promoter. H₂O₂ or AngII exposure resulted in the NF-.kappa.B binding to the promoter. TNF-.alpha. activated H9c2 cell nuclear extract (5 .mu.g) was used as positive control. CAPE (caffeic acid phenethyl ester), a NF-.kappa.B inhibitor, prevented binding in response to H₂O₂. AngII-induced NF-.kappa.B binding was inhibited by unlabeled probe but not mutant unlabeled probe. FIG. 18B shows that AngII and H₂O₂ promote binding of the p50 subunit of NF-.kappa.B to the cardiac Na+ channel promoter. Chromosomal immunoprecipitation assay using primers specific for scn5a promoter shows that the p65 subunit of NF-.kappa.B appears to be constitutively bound to the channel promoter but that the p50 subunit binds in response to AngII or H₂O₂. CAPE, and inhibitor of NF-.kappa.B, could prevent biding of both subunits to the channel promoter. Lanes 1 and 2 are positive and negative controls, respectively. The input DNA was diluted with 1:10.

[0045] FIG. 19 shows that overexpression of the p50 NF-.kappa.B subunit results in Na+ channel transcriptional downregulation. Panel A shows that the presence of the p50 or p65 NF-.kappa.B subunit RNA in H9c2 cells stably transfected with vectors encoding p50, p65, or both. Con represents control cells. Panel B: Quantitative real-time R_{T}-PCR result shows the relative scn5a mRNA abundance was decreased in cell lines expressing the p50 subunit in comparison with control (Con). * p<0.05 vs. control.

[0046] FIG. 20 is a graph showing a comparison of the abundances of SCN5A splice variants as a function of age. Comparing the relative mRNA abundances of the splice variants after dividing subjects into three age groups of 40-49 (40's), 50-59 (50's) and 60-69 (60's) shows that splice variant abundances did not appear to be a function of age.

[0047] FIG. 21 is a set of diagrams showing the targeting strategy to create a mouse SCN5A truncation model. FIG. 21A: Targeting vector pBSK.SCN5A^{1652stop} mapped to the native SCN5A exon 28 region (WT SCN5A allele). FIG. 21B: Map showing incorporation of the targeting vector into the WT allele. FIG. 21C: Map of the truncation mutation introduced into WT SCN5A allele after Cre-mediated excision of the neomycin resistance cassette to create SCN5A^{1652stop}. Restriction digests, PCR primers, and hybridization probes A (3.1-kb PvuII fragment) and B (3.71-kb PvuII fragment) for genotyping are indicated.

[0048] FIG. 22 is a set of photographs of gels showing the genotyping for homologous recombination of the SCN5A^{1652stop}. FIG. 22A. PCR analysis using upper and lower PCR amplicons (see methods and figure S2) demonstrates proper recombination in heterozygous (.+−.) and not in wild-type (WT) mice (+/+). FIGS. 22B and 22C: Southern blot analysis with external probes A and B showing proper incorporation of the truncation vector in a single allele of targeted ES cells (.+−.). FIG. 22D: PCR result of a properly targeted ES cell clone before (neo+) and after (neo−) successful excision of the neomycin resistance cassette. The targeting vector was used as a control. FIG. 22E: BspHI restriction digests to demonstrate incorporation of the targeting vector. Introduction of the coding mutation resulted in elimination of a BspHI restriction site. Therefore, the properly targeting allele displayed an additional 545 bp fragment representing the targeted allele (heterozygous, .+−.) as compared to the 395 bp and 150 bp fragments resulting from the native sequences (wild-type, WT) when performing a BspHI digest of a PCR amplicon spanning this region.

[0049] FIG. 23 demonstrates the effects of expressions of RBM25 and LUC7L3 in human HF tissue. (A) qPCR demonstrates the upregulation of RBM25 and LUC7L3 in human HF tissue. The relative expression changes of RBM25 and LUC7L3 in both normal control (white bars) and failing heart tissue (black bars) are shown. All mRNA abundances are normalized by β-actin. * P<0.05 when compared with control. (B) Western blots quantification confirms the upregulation of RBM25 and LUC7L3 in human HF tissue. Control represents the mixture of 4 normal human heart tissue samples. HF1, HF2, HF3 and HF4 represent the HF tissue sample 1, sample 2, sample 3 and sample 4, respectively. Quantification is based on three replications for each sample. All protein levels are normalized by GAPDH. * P<0.05 when compared with control.

[0050] FIG. 24 provides an illustration of the C-terminal structure of SCN5A and the variants E28C and E28D. (A)* indicates the RBM25 binding site CGGGCA in exon 28 (982 bp-987 bp). Gel mobility shift assays are performed using the biotinylated wild type (WT) probe (B) or the mutant (Mu) probe (C) and purified RBM25 protein. For loading samples from left to right, the amount of RBM25 in each binding reaction is increased by a fold. For the competition assay (D), 0, 1-, 5-, or 20-fold molar excesses of unlabeled WT or Mu probes are added in each binding reaction.

[0051] FIG. 25 demonstrates that. RBM25 and LUC7L3 are involved in SCN5A regulation in Jurkat cells. (A) qPCR demonstrates the upregulation of RBM25 and LUC7L3. The expression changes of RBM25 and LUC7L3 in hypoxia-treated (shaded bars) and Ang II-treated (black bars) vs. normal control Jurkat cells (white bars) are shown at 48 h. HIF-1α is an indicator of hypoxia. mRNA abundances are normalized by β-actin. * P<0.05 when compared with control (N=6). (B) Western blots quantification confirms the upregulation of RBM25 and LUC7L3 in Jurkat cells. Expressions of RBM25 and LUC7L3 are analyzed by time course. * P<0.05 when compared with control (N=6). (C) The expression changes of SCN5A and the variants E28C and E28D in hypoxia-treated (shaded bars) and Ang II-treated (black bars) vs. untreated Jurkat cells (white bars) are shown at 48 h. * P<0.05 when compared with control (N=6). Western blots indicate the downregulation of SCN5A in Jurkat cells with Ang II or hypoxia. (D) qPCR demonstrates that RBM25 and LUC7L3 siRNAs could block the induction of hypoxia on variants E28C and E28D. The representative results at 24 h are shown. * P<0.05 when compared with control (N=6). (E) qPCR demonstrates that RBM25 and LUC7L3 siRNAs could block the induction of variants E28C and E28D by Ang II. Representative results at 48 h are shown. * P<0.05 when compared with control (N=6). Scrambled siRNA had no effect on the induction by Ang II (data not shown). The knockdown efficiency of RBM25 and LUC7L3 siRNAs are evaluated by Western blots and compared to control and scrambled RNA. (F) qPCR demonstrates that RBM25 and LUC7L3 overexpressions decrease the full length SCN5A transcript and increase the variants E28C and E28D at 48 h. * P<0.05 when compared with control (N=6). Exogenously expressed RBM25-GFP and LUC7L3-GFP are detected by Western blot analysis with anti-GFP at 48 h after transfection in Jurkat cells. The representative Western blots show the downregulation of the full-length SCN5A transcript in Jurkat cells with exogenously expressed RBM25 and LUC7L3 as compared to the control group. Full-length SCN5A RNA is unchanged with GFP expression alone.

[0052] FIG. 26 demonstrates the effect of RBM25 shRNA on the expressions of SCN5A and the variants E28C and E28D in Ang II-treated hESC-CMs. (A) Ang II (200 nmol/L) treatment is given to all the experiment groups on infection day 3. R_{T}-PCR measurements are done at 24 h after Ang II treatment and normalized by β-actin. The expression changes of SCN5A and the variants E28C and E28D in Ang II-treated cardiomyocytes pre-infected by RBM25 pLKO.1 shRNA (shaded bars) and pre-infected by scrambled shRNA (black bars) vs. normal Ang II-treated cardiomyocytes (white bars) are shown at 24 h. * P<0.05 compared with normal Ang II-treated cardiomyocytes (N=6). (B) Confocal microscopy shows a hESC-CM. The GFP fluorescence indicates the infection by pGIPZ lentiviral shRNAmir. RBM25 knockdown efficiency is evaluated by qPCR and Western blot (N=6). Scrambled shRNA has no effect on RBM25.

[0053] FIG. 27 demonstrates the effect of Ang II (200 nmol/L) on Na+ currents in hESC-CMs at 24 h after treatment. The representative current traces are shown in the control (A), Ang II-treated (B), Ang II-treated with pre-infection of RBM25 shRNA (C), and TTX-treated groups (D). The peak current statistics of the three experiment groups are shown in I-V curves (E), where the control group (n=3) is represented by filled squares, the Ang II-treated group (n=3) by filled circles, and the Ang II-treated group with pre-infection of RBM25 shRNA (n=3) by open triangles. The data are represented as mean±SEM. The peak current is significantly reduced from −40 to +30 mV in the Ang II-treated group compared to the control group (P<0.05), the maximum reduction was 91.1±9.3% at −30 mV. No difference is observed between the Ang II-treated group with pre-infection of RBM25 shRNA and the control group (E). The specificity of sodium channel current is tested with TTX (a specific sodium channel blocker) in Group D. Scrambled shRNA had no effect on the I-V relationship compared to Ang II alone (data not shown).

[0054] FIG. 28 is a bar graph of relative ratios of variants E28C (“VC”) or E28D (“VD”) of control patients, heart failure (HF) patients, patients with ICDs that have not provided shock (ICD(−) Shock), and patients with ICDs that have provided shock (ICD(+) Shock).

[0055] FIG. 29 represent two graphs demonstrating the correlation of cardiac tissue and blood abundances of SCN5A splice variants normalized to total SCN5A expression. Left panel: Correlation for variant E28C (VC). Right panel: Correlation for variant E28D (VD).

[0056] FIG. 30 represent two graphs of Gaussian distributions of abundances of SCN5A splice variants in control patients, patients with an ICD that provides shocks to the patients, and patients with an ICD that do not provide shocks to the patients. Left panel: Distribution for variant E28C (VC). Right panel: Distribution for variant E28D (VD).

[0057] FIG. 31 is a receiver operator characteristics (ROC) curve for SCN5a variant D as a predictor of appropriate ICD discharges. The line of identity is shown.

[0058] FIG. 32 represents a graph of the univariate odds ratio of sudden death given the patient has elevated VC, elevated VD, NYHA class III/IV heart failure, is taking ACE inhibitor, is on an antiarrhythmic drug, or has an EF less than 30%, or has QRS duration widening greater than 120 ms, respectively.

[0059] FIG. 33 represent two graphs of Gaussian distributions of abundances of SCN5A splice variants in control patients, patients with an ICD that provides shocks to the patients, and patients with an ICD that do not provide shocks to the patients, wherein the abundances are neither normalized to a housekeeping gene nor relative to a level of a full length SCN5A transcript. Left panel: Distribution for variant E28C (VC). Right panel: Distribution for variant E28D (VD).

[0060] FIG. 34 is a schematic of an exemplary embodiment 101 of a system 100 for assessing a subject's need for an implanted cardiac defibrillator (ICD).

[0061] FIG. 35 Correlation of cardiac tissue and WBC mRNA abundances of SCN5A variants VC and VD. Panel A shows tissue levels of the variant VC as a function of WBC levels measured in the same patient. Panel B shows tissue levels of the variant VD as a function of WBC levels measured in the same patient. The best-fit linear regression is displayed as a solid black line. Grey lines represent the 95% confidence intervals.

[0062] FIG. 36. The WBC expression of SCN5A variants in the test groups. Panel A shows fold induction compared to control of SCN5A variant VC in the heart failure (HF), ICD(−)event, and ICD(+)event groups. Panel B shows fold induction compared to control of SCN5A variant VD in the heart failure (HF), ICD(−)event, and ICD(+)event groups. The fold induction values are displayed as median, interquartile ranges, minimum, and maximum. * p<0.05 as compared to control. ** p<0.05 comparing the ICD(+)Event group to the combined HF and ICD(−)Event groups.

[0063] FIG. 37. The effect of clinical characters on the WBC expression of SCN5A VC and VD. Panels A, C, E, G, I, and K as well as B, D, F, H, J, and L compare the effects of race, sex, origin of the cardiomyopathy, left ventricular ejection fraction (LVEF), New York Heart Association heart failure stage (NYHA), and QRS duration on WBC variant VC and VD levels, respectively.

[0064] FIG. 38. Univariate analysis of clinical characteristics on discrimination of ICD events. The data are presented as the odds ratio and 95% confidence intervals.

[0065] FIG. 39. Receiver operation characteristics curves for WBC SCN5A variant VC and VD discrimination of ICD events. Receiver operation characteristics (ROC) curves for normalized VC and VD are compared to LVEF<20%. The area under the ROC curve (95% CI) are 0.98 (0.95, 1.00), 0.97 (0.93, 1.00), and 0.56 (0.41, 0.71) for VC, VD and LVEF≦20%, respectively. The line of no discrimination is also shown.

### DETAILED DESCRIPTION

[0066] SCN5A Transcripts

[0067] As described herein and in the art (e.g., U.S. Application Publication No. 2007/0212723 A1), analysis in or near the promoter and 5′ and 3′ untranslated regions (UTRs) of the SCN5A gene led to identification of multiple specific 5′ and 3′ mRNA splice variants. As shown in FIGS. 1 to 4, the splice variants include Exon 1 splice variants: E1B 1 (SEQ ID NO. 1), E1B2 (SEQ ID NO. 2), E1B3 (SEQ ID NO. 3), and E1B4 (SEQ ID NO. 4), and also include Exon 2 splice variants: E2B1 (SEQ ID NO. 5), E2B2 (SEQ ID NO. 6), and furthermore include Exon 28 splice variants E28B (SEQ ID NO. 7), E28C (SEQ ID NO. 8), or E28D (SEQ ID NO. 9).

[0068] The E1B1, E1B2, E1B3, E1B4, E2B1, and E2B2 splice variants are from the 5′ region, the locations of which in the SCN5A gene and mRNA are depicted in FIG. 1. The nucleic acid sequences for E1B1, E1B2, E1B3, E1B4, E2B1, and E2B2 are shown in FIG. 2. E1A (SEQ ID NO. 10) is the wild-type (or full-length) isoform in and/or near the 5′UTR of exon 1, while E1B1, E1B2, E1B3, E1B4 are its various spliced (or truncated) variants. Similarly, E2A (SEQ ID NO. 11) is the wild-type (full-length) isoform in and/or near the 5′UTR of exon 2, while E2B1, and E2B2 are its various variants.

[0069] The E28B, E28C, or E28D splice variants are from or near the 3′ untranslated region, the locations of which in the SCN5A mRNA are depicted in FIG. 3. The nucleic acid sequences for E28B, E28C, and E28D are set forth in SEQ ID NOs: 7-9, respectively. Each of E28B, E28C, and E28D is a truncated splice variant encoding shortened, dysfunctional channels. Both E28B and E28C contains untranslated and translated regions while E28D contains only translated region of exon 28. The physiological significance of the E28B, E28C and E28D splice variants is supported by a premature stop codon in exon 28 of one of the two SCN5A alleles, resulting in an 86% reduction in the Na⁺ current (Shang et al., Circ. Res., 101:1146-1154, 2007).

[0070] The E28A splice variant is another isoform of the 3′ region of SCN5A Exon 28. There are two isoforms of the E28A: E28A-short (E28A-S) (SEQ ID NO. 12) and E28A-long (E28A-L) (SEQ ID NO. 13). Both isoforms of E28A contains 1239 base pairs in the translated region. The difference between E28-L and E28-S resides in the UTR where E28A-L contains 2295 base pairs of the 3′UTR, while E28A-S contains 834 base pairs of the 3′UTR. E28A-S contains only the first 834 base pairs of the 3′UTR. E28A-L represents the wild-type (WT) isoform. For purposes herein, outside of this paragraph, recitation of “E28A” refers to E28A-S, and E28A-L will be referred to as wild-type or WT, when referencing a SCN5A Exon 28 transcript.

[0071] As used herein, the term “truncated SCN5A Exon 28 transcript” refers to a transcript comprising a shortened or truncated translated region of Exon 28 of the SCN5A gene. In exemplary aspects, the truncated SCN5A Exon 28 transcript is a transcript comprising an E28B transcript, E28C transcript, or E28D transcript, which may be referred to herein as “E28B,” “E28C,” and “E28D,” respectively. In exemplary aspects, the truncated SCN5A Exon 28 transcript is a transcript comprising one of an E28C transcript or E28D transcript.

[0072] As used herein, the term “full length SCN5A Exon 28 transcript” refers to a transcript comprising the full length translated region of Exon 28 of the SCN5A gene. In exemplary aspects, the full length SCN5A Exon 28 transcript is a WT SCN5A Exon 28 transcript. In exemplary aspects, the full length SCN5A Exon 28 transcript is a spliced transcript which is shortened or truncated, as compared to WT SCN5A Exon 28 transcript, yet the spliced transcript still comprises the full length translated region of SCN5A Exon 28. In exemplary aspects, the full length SCN5A Exon 28 transcript is a transcript comprising an E28A transcript (E28A-S).

[0073] Implanted Cardiac Defibrillators

[0074] As used herein, the term “Implanted Cardiac Defibrillator” or “ICD” is synonymous with “implantable cardiac defibrillator” or “implanted cardiac device” or “implantable cardiac device” or “implantable cardioverter-defibrillator device” and refers to a small battery-powered electrical impulse generator that is programmed to deliver a jolt of electricity, when a cardiac arrhythmia is detected. ICDs are implanted into patients who are at risk of sudden cardiac death due to ventricular fibrillation and ventricular tachycardia. Under the current standards used to identify patients in need of an ICD (which are reviewed in Hunt et al., Circulation 119:e391-e479 (2009) and Epstein et al., J Am Coll Cardol 51:e1-e62 (2008)), approximately 60% of those patients that receive an ICD do not receive a shock from the ICD, presumably because the patient does not exhibit a cardiac arrythmia. Therefore, approximately 60% of those patients that receive an ICD do not actually need one.

[0075] The data provided herein demonstrate that patients with an ICD, which provides shocks to the patient, exhibit a profile of levels of SCN5A Exon 28 transcripts that is different from the profile of levels of SCN5A Exon 28 transcripts of patients with an ICD which do not provide shocks to the patient. The data demonstrate that patients with an ICD, which provides shocks to the patient exhibit increased levels of truncated SCN5A Exon 28 splice variant transcripts and exhibit reduced levels of full length SCN5A Exon 28 transcripts. Thus, these data suggest a basis by which the two patient populations (patients who truly need an ICD vs. patients who do not need an ICD) may be distinguished.

[0076] The invention accordingly provides a method of determining a subject's need for an ICD. In exemplary embodiments, the method comprises the step of determining a level of a level of a truncated SCN5A Exon 28 transcript and a level of a full length SCN5A Exon 28 transcript, of a biological sample obtained from the subject. In exemplary embodiments, the method comprises the step of determining a level of all SCN5A Exon 28 transcripts, including WT, E28A, E28B, E28C, E28D. In exemplary aspects, as further described herein, the levels of SCN5A Exon 28 transcripts referenced in the methods herein are normalized to a level of transcripts of a reference gene, e.g., a housekeeping gene.

[0077] In exemplary aspects, the method of determining a subject's need for an ICD comprises determining a ratio, R_{S}, which compares a level of a truncated SCN5A Exon 28 transcript of a biological sample obtained from the subject to (i) a level of a full length SCN5A Exon 28 transcript of the biological sample or (ii) a level of all SCN5A Exon 28 transcripts of the biological sample or (iii) a level of a full length SCN5A Exon 28 transcript and a level or one or more truncated SCN5A Exon 28 transcripts of the biological sample. In exemplary aspects, the subject is determined as needing an ICD, when R_{S} is greater than or equal to a threshold ratio, R_{T}. Further descriptions of each of these ratios are found below.

[0078] Ratio, R_{S}

[0079] In exemplary aspects, the methods of the invention comprises the step of determining a ratio, R_{S}, which compares a level of a truncated SCN5A Exon 28 transcript of a biological sample obtained from the subject to which compares a level of a truncated SCN5A Exon 28 transcript of a biological sample obtained from the subject to (i) a level of a full length SCN5A Exon 28 transcript of the biological sample or (ii) a level of all SCN5A Exon 28 transcripts of the biological sample or (iii) a level of a full length SCN5A Exon 28 transcript and a level or one or more truncated SCN5A Exon 28 transcripts of the biological sample.

[0080] Accordingly, in some aspects, R_{S} is a ratio of [a level of a truncated SCN5A Exon 28 transcript of a biological sample obtained from the subject] to [a full length SCN5A Exon 28 transcript of the biological sample]. As described herein, a full length SCN5A Exon 28 transcript refers to either a WT SCN5A Exon 28 transcript or E28A-S. Accordingly, in specific aspects, R_{S} is a ratio of [a level of a truncated SCN5A Exon 28 transcript of a biological sample obtained from the subject] to [a level of WT SCN5A Exon 28 transcript of the biological sample] or R_{S} is a ratio of [a level of a truncated SCN5A Exon 28 transcript of a biological sample obtained from the subject] to [a level of E28A (E28A-S) of the biological sample].

[0081] In other aspects, R_{S} is [a level of a truncated SCN5A Exon 28 transcript of a biological sample obtained from the subject] to [a level of all SCN5A Exon 28 transcripts: WT, E28A, E28B, E28C, E28D, of the biological sample]. R_{S} therefore may be a ratio of [a level of a truncated SCN5A Exon 28 transcript of a biological sample obtained from the subject] to [a level of (WT SCN5A Exon 28+E28A (E28A-S)+E28B+E28C+E28D) of the biological sample]. In exemplary aspects, R_{S} is a ratio of the level of E28C transcripts to the sum of (the level of WT SCN5A Exon 28 transcript (E28A-L))+(the (the level of E28A-S)+(the level of E28B)+(the level of E28C)+(the level of E28D) of the biological sample. In exemplary aspects, R_{S} is a ratio of the level of E28D transcripts to the sum of (the level of WT SCN5A Exon 28 transcript (E28A-L))+(the (the level of E28A-S)+(the level of E28B)+(the level of E28C)+(the level of E28D) of the biological sample. In exemplary aspects, R_{S} is a ratio of the sum of (the level of E28C transcripts)+(the level of E28D transcripts) to the sum of (the level of WT SCN5A Exon 28 transcript (E28A-L))+(the (the level of E28A-S)+(the level of E28B)+(the level of E28C)+(the level of E28D) of the biological sample.

[0082] In other aspects, R_{S} is [a level of a truncated SCN5A Exon 28 transcript of a biological sample obtained from the subject] to [a level of SCN5A Exon 28 transcripts: E28A-S, E28B, E28C, E28D of the biological sample]. R_{S} therefore may be a ratio of [a level of a truncated SCN5A Exon 28 transcript of a biological sample obtained from the subject] to [a sum of (the level of E28A-S)+(the level of E28B)+(the level of E28C)+(the level of E28D) of the biological sample]. In exemplary aspects, R_{S} is a ratio of the level of E28C transcripts to the sum of (the level of E28A-S)+(the level of E28B)+(the level of E28C)+(the level of E28D) of the biological sample. In exemplary aspects, R_{S} is a ratio of the level of E28D transcripts to the sum of (the level of E28A-S)+(the level of E28B)+(the level of E28C)+(the level of E28D) of the biological sample. In exemplary aspects, R_{S} is a ratio of the sum of (the level of E28C transcripts)+(the level of E28D transcripts) to the sum of (the level of E28A-S)+(the level of E28B)+(the level of E28C)+(the level of E28D) of the biological sample.

[0083] In exemplary aspects, R_{S} is [a level of a truncated SCN5A Exon 28 transcript of a biological sample obtained from the subject] to [a level of a full length SCN5A Exon 28 transcript and a level or one or more truncated SCN5A Exon 28 transcripts of the biological sample]. In specific aspects, R_{S} is a ratio of [a level of a truncated SCN5A Exon 28 transcript of a biological sample obtained from the subject] to [a level of WT SCN5A Exon 28 and one, two, or all of E28B, E28C, E28D]. In specific aspects, R_{S} is a ratio of [a level of a truncated SCN5A Exon 28 transcript of a biological sample obtained from the subject] to [a level of WT SCN5A Exon 28 and all of E28B, E28C, E28D]. In specific aspects, R_{S} is a ratio of [a level of a truncated SCN5A Exon 28 transcript of a biological sample obtained from the subject] to [a level of WT SCN5A Exon 28 and (E28B and E28C). In specific aspects, R_{S} is a ratio of [a level of a truncated SCN5A Exon 28 transcript of a biological sample obtained from the subject] to [a level of WT SCN5A Exon 28 and (E28C and E28D). In specific aspects, R_{S} is a ratio of [a level of a truncated SCN5A Exon 28 transcript of a biological sample obtained from the subject] to [a level of WT SCN5A Exon 28 and (E28B and E28D). In specific aspects, R_{S} is a ratio of [a level of a truncated SCN5A Exon 28 transcript of a biological sample obtained from the subject] to [a level of E28A (E28A-S) and all of E28B, E28C, E28D]. In specific aspects, R_{S} is a ratio of [a level of a truncated SCN5A Exon 28 transcript of a biological sample obtained from the subject] to [a level of E28A (E28A-S) and (E28B and E28C). In specific aspects, R_{S} is a ratio of [a level of a truncated SCN5A Exon 28 transcript of a biological sample obtained from the subject] to [a level of E28A (E28A-S) and (E28C and E28D). In specific aspects, R_{S} is a ratio of [a level of a truncated SCN5A Exon 28 transcript of a biological sample obtained from the subject] to [a level of E28A (E28A-S) and (E28B and E28D).

[0084] In exemplary aspects, each level SCN5A Exon 28 transcript of R_{S} is a calibrated level (calibrated abundance) in which the level is normalized or calibrated to a level of a reference gene, e.g., a housekeeping gene. Suitable housekeeping genes are known in the art, some of which are further described herein.

[0085] In exemplary aspects, each level SCN5A Exon 28 transcript of R_{S} is a control-normalized level. The control-normalized level in exemplary aspects is a level which is the difference between the level of the subject and the level of a control subject. Control subjects are further described herein. In exemplary aspects, the control subject is a subject known as (i) not having an ICD, (ii) not having a cardiac disease, (iii) having normal left ventricular function, (iv) not having diastolic dysfunction, or (v) a combination thereof.

[0086] In exemplary aspects, the step of determining R_{S} comprises calculating values obtained from Real Time Polymerase Chain Reaction (real time PCR). In exemplary aspects, the ΔΔCt mathematical model of data analysis for real-time PCR is applied (Livak et al., Methods 25:402-408 (2001) and Yuan et al., BMC Bioinformatics 7:85 (2006)), such that the calibrated level (calibrated abundance) of a truncated SCN5A Exon 28 transcript=2 to the power of −ΔΔCt of a truncated SCN5A Exon 28 transcript (also, expressed as 2^{-ΔΔCttruncated SCN5A Exon 28 transcript}), wherein ΔΔCt_{truncated SCN5A Exon 28 transcript}=Δ_{Cttruncated SCN5A Exon 28 transcript}−ΔCt_{housekeeping gene}. In exemplary aspects, ΔCt_{truncated SCN5A Exon 28 transcript} is ([Ct of the truncated SCN5A Exon 28 transcript of the subject sample] minus [Ct of the truncated SCN5A Exon 28 transcript of a control sample] and ΔCt_{housekeeping gene} is ([Ct of the housekeeping gene of the subject sample] minus [Ct of the housekeeping gene a control sample]. In exemplary aspects, the control sample is a biological sample obtained from a control subject known as (i) not having an ICD, (ii) not having a cardiac disease, (iii) having normal left ventricular function, (iv) not having diastolic dysfunction, or (v) a combination thereof.

[0087] Accordingly, in exemplary aspects,

$$\begin{matrix}{R}_{S} = \frac{Truncated SCN 5 A Exon 28 transcript}{Full length SCN 5 A Exon 28 transcript} \\ = \frac{Calibrated abundance of truncated SCN 5 A Exon 28 transcript}{Calibrated abundance of full length SCN 5 A Exon 28 transcript}\end{matrix}$$

wherein:

calibrated abundance of truncated SCN5A Exon 28 transcript=2^{-ΔΔCttruncated SCN5A Exon 28 transcript}

calibrated abundance of full length SCN5A Exon 28 transcript=2^{-ΔΔCtfull length SCN5A Exon 28 transcript}

ΔΔCt_{full length SCN5A Exon 28 transcript}=ΔCt_{full length}−ΔCt_{housekeeping gene}

ΔΔCt_{truncated SCN5A Exon 28 transcript}=ΔCt_{truncated}−ΔCt_{housekeeping gene}

ΔCt_{full length}=([Ct of full length SCN5A Exon 28 transcript of subject sample]−[Ct of full length SCN5A Exon 28 transcript of control sample])

ΔCt_{truncated}=([Ct of truncated SCN5A Exon 28 transcript of subject sample]−[Ct of truncated SCN5A Exon 28 transcript of control sample])

ΔCt_{housekeeping gene}=([Ct of housekeeping gene of subject sample]−[Ct of housekeeping gene of control sample])

wherein “subject sample” is a biological sample obtained from the subject and “control sample” is a biological sample obtained from a control subject known as (i) not having an ICD, (ii) not having a cardiac disease, (iii) having normal left ventricular function, (iv) not having diastolic dysfunction, or (v) a combination thereof, wherein “full length” refers to WT SCN5A Exon 28 transcripts or E28A-S transcripts or both WT SCN5A Exon 28 transcripts and E28A-S transcripts.

[0088] Also, in exemplary aspects,

$$\begin{matrix}{R}_{S} = \frac{Truncated SCN 5 A Exon 28 transcript}{All SCN 5 A Exon 28 transcripts} \\ = \frac{Calibrated abundance of truncated SCN 5 A Exon 28 transcript}{Calibrated abundance of all SCN 5 A Exon 28 transcripts}\end{matrix}$$

wherein:

calibrated abundance of truncated SCN5A Exon 28 transcript=2^{-ΔCttruncated SCN5A Exon 28 transcript}

calibrated abundance of all SCN5A Exon 28 transcripts=2^{-ΔΔCtall SCN5A Exon 28 transcripts}

ΔΔCt_{all SCN5A Exon 28 transcripts}=ΔCt_{all SCN5A Exon 28 transcripts}−ΔCt_{housekeeping gene}

ΔΔCt_{truncated SCN5A Exon 28 transcript}=ΔCt_{truncated}−ΔCt_{housekeeping gene}

ΔCt_{all SCN5A Exon 28 transcripts}=([Ct of all SCN5A Exon 28 transcripts of subject sample]−[Ct of all SCN5A Exon 28 transcripts of control sample])

ΔCt_{truncated}=([Ct of truncated SCN5A Exon 28 transcript of subject sample]−[Ct of truncated SCN5A Exon 28 transcript of control sample])

ΔCt_{housekeeping gene}=([Ct of housekeeping gene of subject sample]−[Ct of housekeeping gene of control sample])

wherein “subject sample” is a biological sample obtained from the subject and “control sample” is a biological sample obtained from a control subject known as (i) not having an ICD, (ii) not having a cardiac disease, (iii) having normal left ventricular function, (iv) not having diastolic dysfunction, or (v) a combination thereof, wherein “all SCN5A Exon 28 transcripts” refers to all of WT, E28A-S, E28B, E28C, and E28D.

[0089] In exemplary aspects, the level of the truncated SCN5A Exon 28 transcript comprises a level of SCN5A Exon 28 Splice Variant C (E28C) of a biological sample. In exemplary aspects, the level of the truncated SCN5A Exon 28 transcript comprises a level of SCN5A Exon 28 Splice Variant C (E28D). In exemplary aspects, the level of a truncated SCN5A Exon 28 transcript is a level of E28C of the biological sample and a level of E28D of the biological sample.

[0090] In exemplary aspects, the level of a full length SCN5A Exon 28 transcript is the level of WT SCN5A Exon 28 transcripts. In exemplary aspects, the level of a full length SCN5A Exon 28 transcript is a sum level of [a level of WT SCN5A Exon 28 transcripts]+[a level of SCN5A Exon 28 Splice Variant A (E28A)]. In exemplary aspects, the level of full length SCN5A Exon 28 transcript is a level of E28A (E28-S). In alternative aspects, the level of all SCN5A Exon 28 transcripts is a sum level of [a level of WT SCN5A Exon 28 transcripts]+[a level of E28A]+[a level of E28B]+[a level of E28C]+[a level of E28D].

[0091] In exemplary aspects, R_{S} compares a level of E28C of a biological sample obtained from the subject to (i) a sum level of [a level of WT SCN5A Exon 28 transcripts]+[a level of E28A-S] or (ii) to a level of E28A-S or (iii) to a level of WT. In exemplary aspects,

$$\begin{matrix}{R}_{S} = {R}_{E 28 C} \\ = \frac{Calibrated abundance of E 28 C transcript}{Calibrated abundance of a full length SCN 5 A Exon 28 transcript}\end{matrix}$$

wherein:

calibrated abundance of E28C transcript=2^{-ΔΔCtE28C transcript}

calibrated abundance of full length SCN5A Exon 28 transcript=2^{-ΔΔCtfull length SCN5A Exon 28 transcript}

ΔΔCt_{full length SCN5A Exon 28 transcript}=ΔCt_{full length}−ΔCt_{housekeeping gene}

ΔΔCt_{E28C transcript}=ΔCt_{E28C transcript}−ΔCt_{housekeeping gene}

ΔCt_{full length}=([Ct of full length SCN5A Exon 28 transcript of subject sample]−[Ct of full length SCN5A Exon 28 transcript of control sample])

ΔCt_{E28C}=([Ct of E28C transcript of subject sample]−[Ct of E28C transcript of control sample])

ΔCt_{housekeeping gene}=([Ct of housekeeping gene of subject sample]−[Ct of housekeeping gene of control sample])

wherein “subject sample” is a biological sample obtained from the subject and “control sample” is a biological sample obtained from a control subject known as (i) not having an ICD, (ii) not having a cardiac disease, (iii) having normal left ventricular function, (iv) not having diastolic dysfunction, or (v) a combination thereof, wherein “full length” refers to WT SCN5A Exon 28 transcripts or E28A-S transcripts or both WT SCN5A Exon 28 transcripts and E28A-S transcripts.

[0092] In exemplary aspects, R_{S} compares a level of E28C of a biological sample obtained from the subject to a level of [all SCN5A Exon 28 transcripts: WT, E28A-S, E28B, E28C, and E28D. In exemplary aspects,

$$\begin{matrix}{R}_{S} = {R}_{E 28 C} \\ = \frac{Calibrated abundance of E 28 C transcript}{Calibrated abundance of all SCN 5 A Exon 28 transcripts}\end{matrix}$$

wherein:

calibrated abundance of E28C transcript=2^{-ΔΔCtE28C transcript}

calibrated abundance of all SCN5A Exon 28 transcripts=2^{-ΔΔCtall SCN5A Exon 28 transcripts}

ΔΔCt_{all SCN5A Exon 28 transcripts}=ΔCt_{all SCN5A Exon 28 transcripts}−ΔCt_{housekeeping gene}

ΔΔCt_{E28C transcript}=ΔCt_{E28C transcript}−ΔCt_{housekeeping gene}

ΔCt_{all SCN5A Exon 28 transcripts}=([Ct of all SCN5A Exon 28 transcripts of subject sample]−[Ct of all SCN5A Exon 28 transcripts of control sample])

ΔCt_{E28C}=([Ct of E28C transcript of subject sample]−[Ct of E28C transcript of control sample])

ΔCt_{housekeeping gene}=([Ct of housekeeping gene of subject sample]−[Ct of housekeeping gene of control sample])

wherein “subject sample” is a biological sample obtained from the subject and “control sample” is a biological sample obtained from a control subject known as (i) not having an ICD, (ii) not having a cardiac disease, (iii) having normal left ventricular function, (iv) not having diastolic dysfunction, or (v) a combination thereof, wherein “all SCN5A Exon 28 transcripts” refers to all of WT, E28A-S, E28B, E28C, and E28D.

[0093] In exemplary aspects, R_{S} compares a level of E28D of a biological sample obtained from the subject to (i) a sum level of [a level of WT SCN5A Exon 28 transcripts]+[a level of E28A-S] or (ii) to a level of E28A-S or (iii) to a level of WT. In exemplary aspects,

$$\begin{matrix}{R}_{S} = {R}_{E 28 D} \\ = \frac{Calibrated abundance of E 28 D transcript}{Calibrated abundance of full length SCN 5 A Exon 28 transcript}\end{matrix}$$

wherein:

calibrated abundance of E28D transcript=2^{-ΔΔCtE28D transcript}

calibrated abundance of full length SCN5A Exon 28 transcript=2^{-ΔΔCtfull length SCN}5A Exon 28 transcript

ΔΔCt_{full length SCN5A Exon 28 transcript}=ΔCt_{full length}−ΔCt_{housekeeping gene}

ΔΔCt_{E28D transcript}=ΔCt_{E28D transcript}−ΔCt_{housekeeping gene}

ΔCt_{full length}=([Ct of full length SCN5A Exon 28 transcript of subject sample]−[Ct of full length SCN5A Exon 28 transcript of control sample])

ΔCt_{E28D}=([Ct of E28D transcript of subject sample]−[Ct of E28D transcript of control sample])

ΔCt_{housekeeping gene}=([Ct of housekeeping gene of subject sample]−[Ct of housekeeping gene of control sample])

wherein “subject sample” is a biological sample obtained from the subject and “control sample” is a biological sample obtained from a control subject known as (i) not having an ICD, (ii) not having a cardiac disease, (iii) having normal left ventricular function, (iv) not having diastolic dysfunction, or (v) a combination thereof, wherein “full length” refers to WT SCN5A Exon 28 transcripts or E28A-S transcripts or both WT SCN5A Exon 28 transcripts and E28A-S transcripts.

[0094] In exemplary aspects, R_{S} compares a level of E28D of a biological sample obtained from the subject to a level of [all SCN5A Exon 28 transcripts: WT, E28A-S, E28B, E28C, and E28D. In exemplary aspects,

$$\begin{matrix}{R}_{S} = {R}_{E 28 D} \\ = \frac{Calibrated abundance of E 28 D transcript}{Calibrated abundance of all SCN 5 A Exon 28 transcripts}\end{matrix}$$

wherein:

calibrated abundance of E28D transcript=2^{-ΔΔCtE28D transcript}

calibrated abundance of all SCN5A Exon 28 transcripts=2^{-ΔΔCtall SCN5A Exon 28 transcripts}

ΔΔCt_{all SCN5A Exon 28 transcripts}=ΔCt_{all SCN5A Exon 28 transcripts}−ΔCt_{housekeeping gene}

ΔΔCt_{E28D transcript}=ΔCt_{E28D transcript}−ΔCt_{housekeeping gene}

ΔCt_{all SCN5A Exon 28 transcripts}=([Ct of all SCN5A Exon 28 transcripts of subject sample]−[Ct of all SCN5A Exon 28 transcripts of control sample])

ΔCt_{E28D}=([Ct of E28D transcript of subject sample]−[Ct of E28D transcript of control sample])

ΔCt_{housekeeping gene}=([Ct of housekeeping gene of subject sample]−[Ct of housekeeping gene of control sample])

wherein “subject sample” is a biological sample obtained from the subject and “control sample” is a biological sample obtained from a control subject known as (i) not having an ICD, (ii) not having a cardiac disease, (iii) having normal left ventricular function, (iv) not having diastolic dysfunction, or (v) a combination thereof, wherein “all SCN5A Exon 28 transcripts” refers to all of WT, E28A-S, E28B, E28C, and E28D.

[0095] In exemplary aspects, the method comprises determining a first R_{S} and a second R_{S}, wherein the first R_{S} compares a level of E28C to the level of all SCN5A Exon 28 transcripts, and the second R_{S} compares a level of E28D to the level of all SCN5A Exon 28 transcripts. In exemplary aspects, the first R_{S} is an R_{E28c} and the second R_{S} is an R_{E28D}, as described above.

[0096] In exemplary aspects, R_{S} is as taught above but “all SCN5A Exon 28 transcripts” refers to the sum of the level of E28A-S, E28B, E28C, and E28D.

[0097] Threshold Ratio, R_{T}

[0098] As described herein, the methods of the invention involve a ratio R_{S}, and, in exemplary embodiments, an interpretation of R_{S} is made via its comparison to a threshold ratio, R_{T}. For example, as described further herein, when R_{S} is greater than or equal to R_{T}, the subject is in need of an ICD. Further interpretations of R_{S} relative to R_{T} are described herein.

[0099] In exemplary embodiments, R_{T} serves as a direct reference point for R_{S}, and R_{T} is matched to R_{S}. For example, if R_{S} is a ratio of [a level of a truncated SCN5A Exon 28 transcript of a biological sample obtained from the subject] to [a level of a full length SCN5A Exon 28 transcript of the biological sample obtained from the subject], then R_{T} is a matched ratio, e.g., a ratio of [a level of a truncated SCN5A Exon 28 transcript of a biological sample obtained from the control subject] to [a level of a full length SCN5A Exon 28 transcript of the biological sample obtained from the control subject]. Also, for example, if R_{S} is [a level of a truncated SCN5A Exon 28 transcript of a biological sample obtained from the subject] to [all SCN5A Exon 28 transcripts of the biological sample obtained from the subject], then R_{T} is [a level of a truncated SCN5A Exon 28 transcript of a biological sample obtained from the control subject] to [all SCN5A Exon 28 transcripts of the biological sample obtained from the control subject].

[0100] Also, like R_{S}, in exemplary aspects, each level of R_{T} is a calibrated level (calibrated abundance) in which the level is normalized or calibrated to a level of a reference gene, e.g., a housekeeping gene. Suitable housekeeping genes are known in the art, some of which are further described herein.

[0101] Also, like R_{S}, in exemplary aspects, each level of R_{T} is a control-normalized level. The control-normalized level in exemplary aspects is a level which is the difference between the level of the subject and the level of a control subject. Control subjects are further described herein. In exemplary aspects, the control subject is a subject known as (i) not having an ICD, (ii) not having a cardiac disease, (iii) having normal left ventricular function, (iv) not having diastolic dysfunction, or (v) a combination thereof.

[0102] R_{T} may be defined in one of a variety of manners, depending on factors, including but not limited to, the application of the comparison between R_{S} and R_{T} (e.g., use in determining subject's need for an ICD vs. determining subject's risk for SCD vs. determining need for anti-arrhythmic agent), guidelines, requirements, or policies set by the regulatory agency (e.g., Food and Drug Administration, or like agency) of the region in which the methods of the invention are practiced, current standard health care practices of the region in which the methods of the invention are practiced, and the like.

[0103] In exemplary aspects, R_{T} is a ratio that compares a level of a truncated SCN5A Exon 28 transcript to (i) a level of a full length SCN5A Exon 28 transcript of the biological sample or (ii) a level of all SCN5A Exon 28 transcripts of the biological sample or (iii) a level of a full length SCN5A Exon 28 transcript and a level or one or more truncated SCN5A Exon 28 transcripts of the biological sample, wherein the biological sample is obtained from a control subject known as (i) not having an ICD, (ii) not having a cardiac disease, (iii) having normal left ventricular function, (iv) not having diastolic dysfunction, or (v) a combination thereof.

[0104] In alternative aspects, R_{T}=μ+4.0σ, wherein μ=is the mean value of a Gaussian distribution of a set of data values, wherein each data value of the set represents a ratio that compares a level of a truncated SCN5A Exon 28 transcript of a biological sample obtained from a control subject to (i) a level of a full length SCN5A Exon 28 transcript of the biological sample or (ii) a level of all SCN5A Exon 28 transcripts of the biological sample or (iii) a level of a full length SCN5A Exon 28 transcript and a level or one or more truncated SCN5A Exon 28 transcripts of the biological sample of the control subject, wherein the control subject is a subject known as (i) not having an ICD, (ii) not having a cardiac disease, (iii) having normal left ventricular function, (iv) not having diastolic dysfunction, or (v) a combination thereof, and wherein σ is the standard deviation of the Gaussian distribution of the data values. In exemplary aspects, the ratio that compares a level of a truncated SCN5A Exon 28 transcript of a biological sample obtained from a control subject to (i) a level of a full length SCN5A Exon 28 transcript of the biological sample or (ii) a level of all SCN5A Exon 28 transcripts of the biological sample or (iii) a level of a full length SCN5A Exon 28 transcript and a level or one or more truncated SCN5A Exon 28 transcripts of the biological sample obtained from the control subject is matched to the R_{S} to which it is being compared.

[0105] In other alternative aspects, R_{T} is a ratio that compares a level of a truncated SCN5A Exon 28 transcript to (i) a level of a full length SCN5A Exon 28 transcript of the biological sample or (ii) a level of all SCN5A Exon 28 transcripts of the biological sample or (iii) a level of a full length SCN5A Exon 28 transcript and a level or one or more truncated SCN5A Exon 28 transcripts of the biological sample obtained from a control subject known as having an ICD that has not given a shock.

[0106] In exemplary aspects, R_{T} is determined via Real Time PCR. In exemplary aspects, R_{T} is as follows:

$$\frac{Truncated SCN 5 A Exon 28 transcript}{Full length SCN 5 A Exon 28 transcript} = \frac{\begin{matrix}Calibrated abundance of truncated \\ SCN 5 A Exon 28 transcript\end{matrix}}{\begin{matrix}Calibrated abundance of full length \\ SCN 5 A Exon 28 transcript\end{matrix}}$$

wherein:

calibrated abundance of truncated SCN5A Exon 28 transcript=2^{-ΔΔCttruncated SCN5A Exon 28 transcript}

calibrated abundance of full length SCN5A Exon 28 transcript=2^{-ΔΔCtfull length SCN5A Exon 28 transcript}

ΔΔCt_{full length SCN5A Exon 28 transcript}=ΔCt_{full length}−ΔCt_{housekeeping gene}

ΔΔCt_{truncated SCN5A Exon 28 transcript}=ΔCt_{truncated}−ΔCt_{housekeeping gene}

ΔCt_{full length}=([Ct of full length SCN5A Exon 28 transcript of subject sample]−[Ct of full length SCN5A Exon 28 transcript of control sample])

ΔCt_{truncated}=([Ct of truncated SCN5A Exon 28 transcript of subject sample]−[Ct of truncated SCN5A Exon 28 transcript of control sample])

ΔCt_{housekeeping gene}=([Ct of housekeeping gene of subject sample]−[Ct of housekeeping gene of control sample])

wherein “subject sample” is a biological sample obtained from a subject known as having an ICD that has not given a shock to the subject and “control sample” is a biological sample obtained from a subject known as (i) not having an ICD, (ii) not having a cardiac disease, (iii) having normal left ventricular function, (iv) not having diastolic dysfunction, or (v) a combination thereof, wherein “full length” refers to WT SCN5A Exon 28 transcripts or E28A-S transcripts or both WT SCN5A Exon 28 transcripts and E28A-S transcripts.

[0107] Also, in exemplary aspects,

$$\begin{matrix}{R}_{T} = \frac{Truncated SCN 5 A Exon 28 transcript}{All SCN 5 A Exon 28 transcripts} \\ = \frac{Calibrated abundance of truncated SCN 5 A Exon 28 transcript}{Calibrated abundance of all SCN 5 A Exon 28 transcripts}\end{matrix}$$

wherein:

calibrated abundance of truncated SCN5A Exon 28 transcript=2^{-ΔΔCttruncated SCN5A Exon 28 transcript}

calibrated abundance of all SCN5A Exon 28 transcripts=2^{-ΔΔCtall SCN5A Exon 28 transcripts}

ΔΔCt_{all SCN5A Exon 28 transcripts}=ΔCt_{all SCN5A Exon 28 transcripts}−ΔCt_{housekeeping gene}

ΔΔCt_{truncated SCN5A Exon 28 transcript}=ΔCt_{truncated}−ΔCt_{housekeeping gene}

ΔCt_{all SCN5A Exon 28 transcripts}=([Ct of all SCN5A Exon 28 transcripts of subject sample]−[Ct of all SCN5A Exon 28 transcripts of control sample])

ΔCt_{truncated}=([Ct of truncated SCN5A Exon 28 transcript of subject sample]−[Ct of truncated SCN5A Exon 28 transcript of control sample])

ΔCt_{housekeeping gene}=([Ct of housekeeping gene of subject sample]−[Ct of housekeeping gene of control sample])

wherein “subject sample” is a biological sample obtained from a subject known as having an ICD that has not given a shock to the subject and “control sample” is a biological sample obtained from a control subject known as (i) not having an ICD, (ii) not having a cardiac disease, (iii) having normal left ventricular function, (iv) not having diastolic dysfunction, or (v) a combination thereof, wherein “all SCN5A Exon 28 transcripts” refers to all of WT, E28A-S, E28B, E28C, and E28D.

[0108] In yet other aspects, R_{T}=μ+Xσ, wherein μ=is the mean value of a Gaussian distribution of a set of data values, wherein each data value of the set represents a ratio that which compares a level of a truncated SCN5A Exon 28 transcript of a biological sample obtained from a control subject to (i) a level of a full length SCN5A Exon 28 transcript of the biological sample or (ii) a level of all SCN5A Exon 28 transcripts of the biological sample or (iii) a level of a full length SCN5A Exon 28 transcript and a level or one or more truncated SCN5A Exon 28 transcripts of the biological sample, wherein the control subject is a subject known as having an ICD that has not given a shock, wherein σ is the standard deviation of the Gaussian distribution of the data values, and X is a number between about 0.7 and about 4.0 (e.g., 0.7, 0.8, 0.9, 1.0, 1.1, 1.2, 1.3, 1.4, 1.5, 1.6, 1.7, 1.8, 1.9, 2.0, 2.1, 2.2, 2.3, 2.4, 2.5, 2.6, 2.7, 2.8, 2.9, 3.0, 3.1, 3.2, 3.3, 3.4, 3.5, 3.6, 3.7, 3.8, 3.9, 4.0).

[0109] In exemplary aspects, when R_{T}=μ+Xσ, each data value of the set represents a ratio that compares a level of a truncated SCN5A Exon 28 transcript of a biological sample obtained from a control subject to (i) a level of a full length SCN5A Exon 28 transcript of the biological sample or (ii) a level of all SCN5A Exon 28 transcripts of the biological sample or (iii) a level of a full length SCN5A Exon 28 transcript and a level or one or more truncated SCN5A Exon 28 transcripts, of the biological sample, and the

$$\begin{matrix}ratio = \frac{Truncated SCN 5 A Exon 28 transcript}{Full length SCN 5 A Exon 28 transcript} \\ = \frac{Calibrated abundance of truncated SCN 5 A Exon 28 transcript}{Calibrated abundance of full length SCN 5 A Exon 28 transcript}\end{matrix}$$

wherein:

calibrated abundance of truncated SCN5A Exon 28 transcript=2^{-ΔΔCttruncated SCN5A Exon 28 transcript}

calibrated abundance of full length SCN5A Exon 28 transcript=2^{-ΔΔCtfull length SCN5A Exon 28 transcript}

ΔΔCt_{full length SCN5A Exon 28 transcript}=ΔCt_{full length}−ΔCt_{housekeeping gene}

ΔΔCt_{truncated SCN5A Exon 28 transcript}=ΔCt_{truncated}−ΔCt_{housekeeping gene}

ΔCt_{full length}=([Ct of full length SCN5A Exon 28 transcript of ICD patient (−) shock]−[Ct of full length SCN5A Exon 28 transcript of control sample])

ΔCt_{truncated}=([Ct of truncated SCN5A Exon 28 transcript of ICD patient (−) shock]−[Ct of truncated SCN5A Exon 28 transcript of control sample])

ΔCt_{housekeeping gene}=([Ct of housekeeping gene of ICD patient (−) shock]−[Ct of housekeeping gene of control sample]).

wherein “ICD patient (−) shock” is a biological sample obtained from a subject known as having an ICD that has not given a shock and “control sample” is a biological sample obtained from a control subject known as (i) not having an ICD, (ii) not having a cardiac disease, (iii) having normal left ventricular function, (iv) not having diastolic dysfunction, or (v) a combination thereof, wherein “full length” refers to WT SCN5A Exon 28 transcripts or E28A-S transcripts or both WT SCN5A Exon 28 transcripts and E28A-S transcripts.

[0110] In exemplary aspects, when R_{T}=μ+Xσ, each data value of the set represents a ratio that compares a level of a truncated SCN5A Exon 28 transcript of a biological sample obtained from a control subject to (i) a level of a full length SCN5A Exon 28 transcript of the biological sample or (ii) a level of all SCN5A Exon 28 transcripts of the biological sample or (iii) a level of a full length SCN5A Exon 28 transcript and a level or one or more truncated SCN5A Exon 28 transcripts, of the biological sample, and the

$$\begin{matrix}ratio = \frac{Truncated SCN 5 A Exon 28 transcript}{All SCN 5 A Exon 28 transcripts} \\ = \frac{Calibrated abundance of truncated SCN 5 A Exon 28 transcript}{Calibrated abundance of all SCN 5 A Exon 28 transcripts}\end{matrix}$$

wherein:

calibrated abundance of truncated SCN5A Exon 28 transcript=2^{-ΔΔCttruncated SCN5A Exon 28 transcript}

calibrated abundance of all SCN5A Exon 28 transcripts=2^{-ΔΔCtall SCN5A Exon 28 transcripts}

ΔΔCt_{all SCN5A Exon 28 transcripts}=ΔCt_{all SCN5A Exon 28 transcripts}−ΔCt_{housekeeping gene}

ΔΔCt_{truncated SCN5A Exon 28 transcript}=ΔCt_{truncated}−ΔCt_{housekeeping gene}

ΔCt_{all SCN5A Exon 28 transcripts}=([Ct of all SCN5A Exon 28 transcripts of ICD patient (−) shock]−[Ct of all SCN5A Exon 28 transcripts of control sample])

ΔCt_{truncated}=([Ct of truncated SCN5A Exon 28 transcript of ICD patient (−) shock]−[Ct of truncated SCN5A Exon 28 transcript of control sample])

ΔCt_{housekeeping gene}=([Ct of housekeeping gene of ICD patient (−) shock]−[Ct of housekeeping gene of control sample])

wherein “ICD patient (−) shock” is a biological sample obtained from a subject known as having an ICD that has not given a shock and “control sample” is a biological sample obtained from a control subject known as (i) not having an ICD, (ii) not having a cardiac disease, (iii) having normal left ventricular function, (iv) not having diastolic dysfunction, or (v) a combination thereof, wherein “all SCN5A Exon 28 transcripts” refers to all of WT, E28A-S, E28B, E28C, and E28D.

[0111] Alternatively, R_{T}=μ−Xσ, wherein μ=is the mean value of a Gaussian distribution of a set of data values, wherein each data value of the set represents a ratio that compares a level of a truncated SCN5A Exon 28 transcript of a biological sample obtained from a control subject to (i) a level of a full length SCN5A Exon 28 transcript of the biological sample or (ii) a level of all SCN5A Exon 28 transcripts of the biological sample or (iii) a level of a full length SCN5A Exon 28 transcript and a level or one or more truncated SCN5A Exon 28 transcripts of the biological sample of the control subject, wherein the control subject is a subject known as having an ICD that has given a shock to the control subject, wherein σ is the standard deviation of the Gaussian distribution of the data values, and X is a number between about 0.7 and about 4.0 (e.g., 0.7, 0.8, 0.9, 1.0, 1.1, 1.2, 1.3, 1.4, 1.5, 1.6, 1.7, 1.8, 1.9, 2.0, 2.1, 2.2, 2.3, 2.4, 2.5, 2.6, 2.7, 2.8, 2.9, 3.0, 3.1, 3.2, 3.3, 3.4, 3.5, 3.6, 3.7, 3.8, 3.9, 4.0). In exemplary aspects, X is a number between about 0.7 and about 1.0 or a number between about 2.0 and about 4.0 or a number between about 2.3 and about 4.0. In exemplary aspect, X is 2.326.

[0112] In exemplary aspects, when R_{T}=μ−Xσ, each data value of the set represents a ratio that compares a level of a truncated SCN5A Exon 28 transcript of a biological sample obtained from a control subject to (i) a level of a full length SCN5A Exon 28 transcript of the biological sample or (ii) a level of all SCN5A Exon 28 transcripts of the biological sample or (iii) a level of a full length SCN5A Exon 28 transcript and a level or one or more truncated SCN5A Exon 28 transcripts of the biological sample of the control subject, and the ratio is

$$\frac{Truncated SCN 5 A Exon 28 transcript}{Full length SCN 5 A Exon 28 transcript} = \frac{\begin{matrix}Calibrated abundance of truncated \\ SCN 5 A Exon 28 transcript\end{matrix}}{\begin{matrix}Calibrated abundance of full length \\ SCN 5 A Exon 28 transcript\end{matrix}}$$

wherein:

calibrated abundance of truncated SCN5A Exon 28 transcript=2^{-ΔΔCttruncated SCN5A Exon 28 transcript}

calibrated abundance of full length SCN5A Exon 28 transcript=2^{-ΔΔCtfull length SCN5A Exon 28 transcript}

ΔΔCt_{full length SCN5A Exon 28 transcript}=ΔCt_{full length}−ΔCt_{housekeeping gene}

ΔΔCt_{truncated SCN5A Exon 28 transcript}=ΔCt_{truncated}−ΔCt_{housekeeping gene}

ΔCt_{full length}=([Ct of full length SCN5A Exon 28 transcript of ICD patient (+) shock]−[Ct of full length SCN5A Exon 28 transcript of control sample])

ΔCt_{truncated}=([Ct of truncated SCN5A Exon 28 transcript of ICD patient (+) shock]−[Ct of truncated SCN5A Exon 28 transcript of control sample])

ΔCt_{housekeeping gene}=([Ct of housekeeping gene of ICD patient (+) shock]−[Ct of housekeeping gene of control sample]).

wherein “ICD patient (+) shock” is a biological sample obtained from a subject known as having an ICD that has given a shock and “control sample” is a biological sample obtained from a control subject known as (i) not having an ICD, (ii) not having a cardiac disease, (iii) having normal left ventricular function, (iv) not having diastolic dysfunction, or (v) a combination thereof, wherein “full length” refers to WT SCN5A Exon 28 transcripts or E28A-S transcripts or both WT SCN5A Exon 28 transcripts and E28A-S transcripts.

[0113] In exemplary aspects, when R_{T}=μ−Xσ, each data value of the set represents a ratio that compares a level of a truncated SCN5A Exon 28 transcript of a biological sample obtained from a control subject to (i) a level of a full length SCN5A Exon 28 transcript of the biological sample or (ii) a level of all SCN5A Exon 28 transcripts of the biological sample or (iii) a level of a full length SCN5A Exon 28 transcript and a level or one or more truncated SCN5A Exon 28 transcripts of the biological sample of the control subject, and the ratio is

$$\frac{Truncated SCN 5 A Exon 28 transcript}{All SCN 5 A Exon 28 transcripts} = \frac{Calibrated abundance of truncated SCN 5 A Exon 28 transcript}{Calibrated abundance of all SCN 5 A Exon 28 transcripts}$$

wherein:

calibrated abundance of truncated SCN5A Exon 28 transcript=2^{-ΔΔCttruncated SCN5A Exon 28 transcript}

calibrated abundance of all SCN5A Exon 28 transcripts=2^{-ΔΔCtall SCN5A Exon 28 transcripts}

ΔΔCt_{all SCN5A Exon 28 transcripts}=ΔCt_{all SCN5A Exon 28 transcripts}−ΔCt_{housekeeping gene}

ΔΔCt_{truncated SCN5A Exon 28 transcript}=ΔCt_{truncated}−ΔCt_{housekeeping gene}

ΔCt_{all SCN5A Exon 28 transcripts}=([Ct of all SCN5A Exon 28 transcripts of ICD patient (+) shock]−[Ct of all SCN5A Exon 28 transcripts of control sample])

ΔCt_{truncated}=([Ct of truncated SCN5A Exon 28 transcript of ICD patient (+) shock]−[Ct of truncated SCN5A Exon 28 transcript of control sample])

ΔCt_{housekeeping gene}=([Ct of housekeeping gene of ICD patient (+) shock]−[Ct of housekeeping gene of control sample])

wherein “ICD patient (+) shock” is a biological sample obtained from a subject known as having an ICD that has given a shock and “control sample” is a biological sample obtained from a control subject known as (i) not having an ICD, (ii) not having a cardiac disease, (iii) having normal left ventricular function, (iv) not having diastolic dysfunction, or (v) a combination thereof, wherein “all SCN5A Exon 28 transcripts” refers to all of WT, E28A-S, E28B, E28C, and E28D.

[0114] In exemplary aspects, R_{T} is determined by a system. In exemplary aspects, the system comprises a processor and a memory device coupled to the processor, wherein the memory device stores machine readable instructions that, when executed by the processor, cause the processor to:
[0115] (i) receive a plurality of data values, each data value is a ratio determined from a biological sample obtained from a subject of a first population, wherein the ratio compares a level of a truncated SCN5A Exon 28 transcript to (a) a level of a full length SCN5A Exon 28 transcript of the biological sample or (b) a level of all SCN5A Exon 28 transcripts of the biological sample or (c) a level of a full length SCN5A Exon 28 transcript and a level or one or more truncated SCN5A Exon 28 transcripts of the biological sample, wherein each subject of the first population is a subject known as having an ICD that has given a shock;
[0116] (ii) fit the plurality of data values to a first Gaussian distribution;

[0117] (iii) determine a mean value, μ, and a standard deviation, σ, of the first Gaussian distribution;
[0118] (iv) set a first threshold ratio, R_{T}, at μ−Xσ, wherein X is a number between 0.7 and 4.0.

[0119] Further descriptions of suitable systems that may be used to determine R_{T} is provided herein below.

[0120] Sudden Cardiac Death and Methods Relating Thereto

[0121] Sudden cardiac death (SCD) accounts for approximately 325,000 deaths per year in the United States, which number is higher than the number of deaths attributed to lung cancer, breast cancer, or acquired immune deficiency syndrome (AIDS). SCD is responsible for about 50% of deaths from heart failure and often is the first expression of coronary disease. See, Sovari et al., “Sudden Cardiac Death,” e-medicine Cardiology, article 151907, updated Nov. 4, 2010; and Zheng et al., Circulation 104: 2158-2163 (2001). A common cause of SCD is ventricular arrhythmia, including, for example, ventricular tachycardia (VT), in which the resting heart rate is faster than normal, ventricular fibrillation (VF), in which there is uncoordinated contraction of the cardiac muscle of the ventricles in the heart, making the muscles quiver rather than contract properly, or an arrhythmic condition in which both VT and VF are present. See, Wedro, B., “Sudden Cardiac Arrest (Sudden Cardiac Death),” medicine.net, Kulick and Soppler, eds. Current methods of treating ventricular fibrillation include defibrillation via an electrical defibrillator or a precordial thump. Anti-arrhythmic therapy aims to treat or prevent ventricular arrhythmias, thereby, preventing SCD. A type of anti-arrhythmic therapy includes implantation of an ICD into a patient. ICDs are further described herein.

[0122] As discussed, data provided herein support a means by which patients who receive shocks from ICDs may be identified based on levels of SCN5A Exon 28 transcript levels. Because patients who receive shocks from ICDs are at high risk for sudden cardiac death (SCD), the data provided herein also supports, in part, a means by which patients at risk for SCD may be identified. Accordingly, the invention provides a method of identifying patients at risk for sudden cardiac death. Stated in an alternative way, the invention also provides methods of determining a subject's risk for sudden cardiac death (SCD). In exemplary embodiments, such methods comprise the step of determining a ratio, Rₛ, which compares a level of a truncated SCN5A Exon 28 transcript of a biological sample obtained from the subject to (i) a level of a full length SCN5A Exon 28 transcript of the biological sample or (ii) a level of all SCN5A Exon 28 transcripts of the biological sample or (iii) a level of a full length SCN5A Exon 28 transcript and a level or one or more truncated SCN5A Exon 28 transcripts of the biological sample. In exemplary aspects, the subject is determined to be at risk for SCD, when R_{S} is greater than or equal to a threshold ratio, R_{T}.

[0123] With regard to the methods of determining a subject's risk for sudden cardiac death provided herein, R_{S}, in exemplary aspects, is the same as any one of those described herein (e.g., those described above in the subsection entitled: Ratio, R_{S}). Also, in exemplary aspects the threshold ratio R_{T} is the same as any one of those described herein (e.g., those described above in the section entitled Threshold Ratio, R_{T}).

[0124] Methods of Monitoring Risk for Sudden Cardiac Death

[0125] In exemplary aspects, the step of determining a ratio, Rₛ, is repeated at least one, if not, two, or more times. In exemplary aspects, ratio, Rₛ is determined 2, 3, 4, 5, 6, 7, 8, 9 10, or more times. In such cases, the method may be considered as a method of monitoring a subject's risk for SCD. In exemplary aspects, ratio, Rₛ is determined every 6 to 12 months (e.g., every 6, every 7 months, every 8 months, every 9 months, every 10 months, every 11 months, every 12 months months) and each time, Rₛ is based on a different biological sample obtained from the same subject.

[0126] Methods of Determining Need for Anti-Arrhythmic Therapy

[0127] In some cases, patients who have been determined to be at risk for SCD are provided anti-arrhythmic therapy. Because the methods of the invention provide a means by which a subject's risk for SCD is determined, the methods of the invention also provide a means by which a subject's need for anti-arrhythmic therapy is determined. Accordingly, the invention provides a method of determining a subject's need for anti-arrhythmic therapy. In exemplary embodiments, the method comprises the step of determining a ratio, Rₛ, which compares a level of a truncated SCN5A Exon 28 transcript of a biological sample obtained from the subject to (i) a level of a full length SCN5A Exon 28 transcript of the biological sample or (ii) a level of all SCN5A Exon 28 transcripts of the biological sample or (iii) a level of a full length SCN5A Exon 28 transcript and a level or one or more truncated SCN5A Exon 28 transcripts of the biological sample. In exemplary aspects, the subject is determined to need anti-arrhythmic therapy, when R_{S} is greater than or equal to a threshold ratio, R_{T}.

[0128] With regard to the methods of determining a subject's need for anti-arrhythmic therapy provided herein, R_{S}, in exemplary aspects, is the same as any one of those described herein (e.g., those described above in the subsection entitled: Ratio, R_{S}). Also, in exemplary aspects the threshold ratio R_{T} is the same as any one of those described herein (e.g., those described above in the section entitled Threshold Ratio, R_{T}).

[0129] In exemplary aspects, the anti-arrhythmic therapy is implantation of an ICD, or related device. In exemplary aspects, the anti-arrhythmic therapy is administration of an anti-arrhythmic agent.

[0130] Anti-Arrhythmic Agents

[0131] For purposes herein, the anti-arrhythmic agent is any one of a group of pharmaceuticals that are used to suppress abnormal rhythms of the heart (cardiac arrhythmias), such as atrial fibrillation, atrial flutter, ventricular tachycardia, and ventricular fibrillation. In exemplary aspects, the anti-arrhythmic agent is a Singh Vaughan Williams (SVW) Class I, II, III, IV, or V anti-arrhythmic agent. In exemplary aspects, the anti-arrhythmic agent is a SVW Class IA, IB, IC, or III anti-arrhythmic agent. The anti-arrhythmic agent may be a fast-channel blocker, a beta blocker, a slow channel blocker, a sodium channel blocking agent, a potassium channel blocking agent, or a calcium channel blocking agent. The anti-arrhythmic agent in some aspects is one of Quinidine, Procainamide, Disopyramide, Lidocaine, Phenyloin, Mexiletine, Tocamide, Flecamide, Propafenone, Moricizine, Propranolol, Esmolol, Timolol, Metoprolol, Atenolol, Bisoprolol, Amiodarone, Sotalol, Ibutilide, Dofetilide, Dronedarone, E-4031, Verapamil, Diltiazem, Adenosine, Digoxin, or Magnesium Sulfate. In some aspects, the SVW Class IA is Quinidine, Procainamide, or Disopyramide. In some aspects, the SVW Class IB anti-arrhythmic agent is Lidocaine, Phenyloin, Mexiletine, or Tocamide. In some aspects, the SVW Class IC anti-arrhythmic agent is Flecamide, Propafenone, Moricizine, or Encamide. In some aspects, the SVW Class III anti-arrhythmic agent is Dronedarone, Amiodarone, or Ibutilide. In some aspects, the anti-arrhythmic agent is NAD+ or mitoTEMPO.

[0132] Methods Of Reducing Risk of Sudden Cardiac Death

[0133] The invention additionally provides methods of reducing risk of SCD in a subject. The method comprises determining a subject's risk for SCD and treating the subject, when the subject has been determined to be at risk for SCD. In exemplary embodiments, the methods of reducing risk of SCD in a subject provided herein comprises the steps of (A) determining a ratio, Rₛ, which compares a level of a truncated SCN5A Exon 28 transcript of a biological sample obtained from the subject to (i) a level of a full length SCN5A Exon 28 transcript of the biological sample or (ii) a level of all SCN5A Exon 28 transcripts of the biological sample or (iii) a level of a full length SCN5A Exon 28 transcript and a level or one or more truncated SCN5A Exon 28 transcripts of the biological sample; and (B) providing therapy to the subject, when R_{S} is greater than or equal to a threshold ratio, R_{T}.

[0134] With regard to the methods of reducing risk of SCD provided herein, R_{S}, in exemplary aspects, is the same as any one of those described herein (e.g., those described above in the subsection entitled: Ratio, R_{S}). Also, in exemplary aspects the threshold ratio R_{T} is the same as any one of those described herein (e.g., those described above in the section entitled Threshold Ratio, R_{T}).

[0135] In exemplary aspects, the therapy provided to the subject, is an anti-arrhythmic therapy. In exemplary aspects, the therapy is implantation of an ICD. Accordingly, the methods of reducing risk of SCD provided herein may comprise the step of implanting an ICD, when R_{S} is greater than or equal to a threshold ratio, R_{T}. In exemplary aspects, the therapy is administration of an anti-arrhythmic agent. Suitable anti-arrhythmic agents are known in the art and described herein in the section called Anti-Arrhythmic agents. In exemplary aspects, the therapy is an angiotensin blocker, an ACE inhibitor, a sodium channel inhibitor, NAD+, a mitochondrial targeted anti-oxidant, mitoQ, midTEMPO, an activator of Protein Kinase A, forskolin, BH4, or a Src inhibitor.

[0136] Heart Failure and Methods Relating Thereto

[0137] Heart failure (HF) is defined as the ability of the heart to supply sufficient blood flow to meet the body's needs. In some embodiments, the signs and symptoms of heart failure include dyspnea (e.g., orthopnea, paroxysmal nocturnal dyspnea), coughing, cardiac asthma, wheezing, dizziness, confusion, cool extremities at rest, chronic venous congestion, ankle swelling, peripheral edema or anasarca, nocturia, ascites, heptomegaly, jaundice, coagulopathy, fatigue, exercise intolerance, jugular venous distension, pulmonary rales, peripheral edema, pulmonary vascular redistribution, interstitial edema, pleural effusions, or a combination thereof. In some embodiments, the symptom of heart failure is one of the symptoms listed in the following table, which provides a basis for classification of heart failure according to the New York Heart Association (NYHA).

| NYHA | |
|---|---|
| Class | Symptoms |
| I | No symptoms and no limitation in ordinary physical activity, |
| | e.g. shortness of breath when walking, climbing stairs etc. |
| II | Mild symptoms (mild shortness of breath and/or angina) and |
| | slight limitation during ordinary activity. |
| III | Marked limitation in activity due to symptoms, even during less- |
| | than-ordinary activity, e.g. walking short distances (20-100 m). |
| | Comfortable only at rest. |
| IV | Severe limitations. Experiences symptoms even while at rest. |
| | Mostly bedbound patients. |

[0138] In exemplary aspects, the heart failure is a systolic heart failure, which is heart failure caused or characterized by a systolic dysfunction. In simple terms, systolic dysfunction is a condition in which the pump function or contraction of the heart (i.e., systole), fails. Systolic dysfunction may be characterized by a decreased or reduced ejection fraction, e.g., an ejection fraction which is less than 45%, and an increased ventricular end-diastolic pressure and volume. In some aspects, the strength of ventricular contraction is weakened and insufficient for creating an appropriate stroke volume, resulting in less cardiac output. In some aspects, the systolic heart failure is an ischemic heart failure. In alternative aspects, the systolic heart failure is a nonischemic heart failure.

[0139] As discussed herein, heart failure patients exhibited increased levels of truncated SCN5A Exon 28 transcripts and increased levels of full length SCN5A Exon 28 transcripts. Such findings support a means by which heart failure patients may be identified. Accordingly, the invention provides a method of identifying patients at risk for heart failure. Stated in an alternative way, the invention also provides methods of determining a subject's risk for heart failure. In exemplary embodiments, such methods comprise the step of determining a ratio, Rₛ, which compares a level of a truncated SCN5A Exon 28 transcript of a biological sample obtained from the subject to (i) a level of a full length SCN5A Exon 28 transcript of the biological sample or (ii) a level of all SCN5A Exon 28 transcripts of the biological sample or (iii) a level of a full length SCN5A Exon 28 transcript and a level or one or more truncated SCN5A Exon 28 transcripts of the biological sample. In exemplary aspects, the subject is determined to be at risk for HF, when R_{S} is greater than or equal to a threshold ratio, R_{T}.

[0140] With regard to the methods of determining a subject's risk for HF provided herein, R_{S}, in exemplary aspects, is the same as any one of those described herein (e.g., those described above in the subsection entitled: Ratio, R_{S}). The threshold ratio R_{T} is essentially the same as those described herein (e.g., those described above in the section entitled Threshold Ratio, R_{T}), except that, in some instances, the control sample, or control subject, or subject is different from those described in that section. For example, in respect to the methods of determining a subject's risk for HF provided herein, R_{T} in exemplary aspects is a ratio that compares a level of a truncated SCN5A Exon 28 transcript of a biological sample to (i) a level of a full length SCN5A Exon 28 transcript of the biological sample or (ii) a level of all SCN5A Exon 28 transcripts of the biological sample or (iii) a level of a full length SCN5A Exon 28 transcript and a level or one or more truncated SCN5A Exon 28 transcripts of the biological sample, wherein the biological sample is obtained from a control subject known as (i) not having an ICD, (ii) not having a cardiac disease, e.g., heart failure, (iii) having normal left ventricular function, (iv) not having diastolic dysfunction, or (v) a combination thereof.

[0141] In alternative aspects, R_{T}=μ+4.0σ, wherein μ=is the mean value of a Gaussian distribution of a set of data values, wherein each data value of the set represents a ratio that compares a level of a truncated SCN5A Exon 28 transcript of a biological sample obtained from a control subject to (i) a level of a full length SCN5A Exon 28 transcript of the biological sample or (ii) a level of all SCN5A Exon 28 transcripts of the biological sample or (iii) a level of a full length SCN5A Exon 28 transcript and a level or one or more truncated SCN5A Exon 28 transcripts of the biological sample of the control subject, wherein the control subject is a subject known as (i) not having an ICD, (ii) not having a cardiac disease, e.g., heart failure, (iii) having normal left ventricular function, (iv) not having diastolic dysfunction, or (v) a combination thereof, and wherein σ is the standard deviation of the Gaussian distribution of the data values. In exemplary aspects, the ratio that compares a level of a truncated SCN5A Exon 28 transcript of a biological sample obtained from a control subject to (i) a level of a full length SCN5A Exon 28 transcript of the biological sample or (ii) a level of all SCN5A Exon 28 transcripts of the biological sample or (iii) a level of a full length SCN5A Exon 28 transcript and a level or one or more truncated SCN5A Exon 28 transcripts of the biological sample obtained from the control subject is matched to the R_{S} to which it is being compared.

[0142] Alternatively, R_{T}=μ−Xσ, wherein μ=is the mean value of a Gaussian distribution of a set of data values, wherein each data value of the set represents a ratio that compares a level of a truncated SCN5A Exon 28 transcript of a biological sample obtained from a control subject to (i) a level of a full length SCN5A Exon 28 transcript of the biological sample or (ii) a level of all SCN5A Exon 28 transcripts of the biological sample or (iii) a level of a full length SCN5A Exon 28 transcript and a level or one or more truncated SCN5A Exon 28 transcripts of the biological sample of the control subject, wherein the control subject is a subject known as having heart failure, wherein σ is the standard deviation of the Gaussian distribution of the data values, and X is a number between about 0.7 and about 4.0 (e.g., 0.7, 0.8, 0.9, 1.0, 1.1, 1.2, 1.3, 1.4, 1.5, 1.6, 1.7, 1.8, 1.9, 2.0, 2.1, 2.2, 2.3, 2.4, 2.5, 2.6, 2.7, 2.8, 2.9, 3.0, 3.1, 3.2, 3.3, 3.4, 3.5, 3.6, 3.7, 3.8, 3.9, 4.0). In exemplary aspects, X is a number between about 0.7 and about 1.0 or a number between about 2.0 and about 4.0 or a number between about 2.3 and about 4.0. In exemplary aspect, X is 2.326.

[0143] In exemplary aspects, when R_{T}=μ−Xσ, each data value of the set represents a ratio that compares a level of a truncated SCN5A Exon 28 transcript of a biological sample obtained from a control subject to (i) a level of a full length SCN5A Exon 28 transcript of the biological sample or (ii) a level of all SCN5A Exon 28 transcripts of the biological sample or (iii) a level of a full length SCN5A Exon 28 transcript and a level or one or more truncated SCN5A Exon 28 transcripts of the biological sample of the control subject, and the ratio is

$$\frac{Truncated SCN 5 A Exon 28 transcript}{Full length SCN 5 A Exon 28 transcript} = \frac{\begin{matrix}Calibrated abundance of truncated \\ SCN 5 A Exon 28 transcript\end{matrix}}{\begin{matrix}Calibrated abundance of full length \\ SCN 5 A Exon 28 transcript\end{matrix}}$$

wherein:

calibrated abundance of truncated SCN5A Exon 28 transcript=2^{-ΔΔCttruncated SCN5A Exon 28 transcript}

calibrated abundance of full length SCN5A Exon 28 transcript=2^{-ΔΔCtfull length SCN5A Exon 28 transcript}

ΔΔCt_{full length SCN5A Exon 28 transcript}=ΔCt_{full length}−ΔCt_{housekeeping gene}

ΔΔCt_{truncated SCN5A Exon 28 transcript}=ΔCt_{truncated}−ΔCt_{housekeeping gene}

ΔCt_{full length}=([Ct of full length SCN5A Exon 28 transcript of heart failure patient sample]−[Ct of full length SCN5A Exon 28 transcript of control sample])

ΔCt_{truncated}=([Ct of truncated SCN5A Exon 28 transcript of heart failure patient sample]−[Ct of truncated SCN5A Exon 28 transcript of control sample])

ΔCt_{housekeeping gene}=([Ct of housekeeping gene of heart failure patient sample]−[Ct of housekeeping gene of control sample]).

wherein “heart failure patient sample” is a biological sample obtained from a subject known as having heart failure and “control sample” is a biological sample obtained from a control subject known as (i) not having an ICD, (ii) not having a cardiac disease, e.g., heart failure, (iii) having normal left ventricular function, (iv) not having diastolic dysfunction, or (v) a combination thereof, wherein “full length” refers to WT SCN5A Exon 28 transcripts or E28A-S transcripts or both WT SCN5A Exon 28 transcripts and E28A-S transcripts.

[0144] In exemplary aspects, when R_{T}=μ−Xσ, each data value of the set represents a ratio that compares a level of a truncated SCN5A Exon 28 transcript of a biological sample obtained from a control subject to (i) a level of a full length SCN5A Exon 28 transcript of the biological sample or (ii) a level of all SCN5A Exon 28 transcripts of the biological sample or (iii) a level of a full length SCN5A Exon 28 transcript and a level or one or more truncated SCN5A Exon 28 transcripts of the biological sample of the control subject, and the ratio is

$$\frac{Truncated SCN 5 A Exon 28 transcript}{All SCN 5 A Exon 28 transcripts} = \frac{Calibrated abundance of truncated SCN 5 A Exon 28 transcript}{Calibrated abundance of all SCN 5 A Exon 28 transcripts}$$

wherein:

calibrated abundance of truncated SCN5A Exon 28 transcript=2^{-ΔΔCttruncated SCN5A Exon 28 transcript}

calibrated abundance of all SCN5A Exon 28 transcripts=2^{-ΔΔCtall SCN5A Exon 28 transcripts}

ΔΔCt_{all SCN5A Exon 28 transcripts}=ΔCt_{all SCN5A Exon 28 transcripts}−ΔCt_{housekeeping gene}

ΔΔCt_{truncated SCN5A Exon 28 transcript}=ΔCt_{truncated}−ΔCt_{housekeeping gene}

ΔCt_{all SCN5A Exon 28 transcripts}=([Ct of all SCN5A Exon 28 transcripts of heart failure patient sample]−[Ct of all SCN5A Exon 28 transcripts of control sample])

ΔCt_{truncated}=([Ct of truncated SCN5A Exon 28 transcript of heart failure patient sample]−[Ct of truncated SCN5A Exon 28 transcript of control sample])

ΔCt_{housekeeping gene}=([Ct of housekeeping gene of heart failure patient sample]−[Ct of housekeeping gene of control sample])

wherein “heart failure patient sample” is a biological sample obtained from a subject known as having heart failure and “control sample” is a biological sample obtained from a control subject known as (i) not having an ICD, (ii) not having a cardiac disease, e.g., heart failure, (iii) having normal left ventricular function, (iv) not having diastolic dysfunction, or (v) a combination thereof, wherein “all SCN5A Exon 28 transcripts” refers to all of WT, E28A-S, E28B, E28C, and E28D.

[0145] In exemplary aspects, R_{T} is determined by a system. In exemplary aspects, the system comprises a processor and a memory device coupled to the processor, wherein the memory device stores machine readable instructions that, when executed by the processor, cause the processor to:
[0146] (i) receive a plurality of data values, each data value is a ratio determined from a biological sample obtained from a subject of a first population, wherein the ratio compares a level of a truncated SCN5A Exon 28 transcript to (a) a level of a full length SCN5A Exon 28 transcript of the biological sample or (b) a level of all SCN5A Exon 28 transcripts of the biological sample or (c) a level of a full length SCN5A Exon 28 transcript and a level or one or more truncated SCN5A Exon 28 transcripts of the biological sample, wherein each subject of the first population is a subject known as having heart failure;
[0147] (ii) fit the plurality of data values to a first Gaussian distribution;
[0148] (iii) determine a mean value, μ, and a standard deviation, σ, of the first Gaussian distribution;
[0149] (iv) set a first threshold ratio, R_{T}, at μ−Xσ, wherein X is a number between 0.7 and 4.0.

[0150] Further descriptions of suitable systems that may be used to determine R_{T} is provided herein below.

[0151] Methods Of Monitoring Risk for HF

[0152] In exemplary aspects, the step of determining a ratio, Rₛ, is repeated at least one, if not, two, or more times. In exemplary aspects, ratio, Rₛ is determined 2, 3, 4, 5, 6, 7, 8, 9 10, or more times. In such cases, the method may be considered as a method of monitoring a subject's risk for HF. In exemplary aspects, ratio, Rₛ is determined every 6 to 12 months (e.g., every 6, every 7 months, every 8 months, every 9 months, every 10 months, every 11 months, every 12 months months) and each time, Rₛ is based on a different biological sample obtained from the same subject.

[0153] Methods of Determining Need for Anti-HF Therapy

[0154] The invention also provides a method of determining a subject's need for therapy or prophylaxis for HF. In exemplary embodiments, the method comprises the step of determining a ratio, Rₛ, which compares a level of a truncated SCN5A Exon 28 transcript of a biological sample obtained from the subject to (i) a level of a full length SCN5A Exon 28 transcript of the biological sample or (ii) a level of all SCN5A Exon 28 transcripts of the biological sample or (iii) a level of a full length SCN5A Exon 28 transcript and a level or one or more truncated SCN5A Exon 28 transcripts of the biological sample. In exemplary aspects, the subject is determined to need therapy, when R_{S} is greater than or equal to a threshold ratio, R_{T}.

[0155] With regard to the methods of determining a subject's need for anti-HF therapy provided herein, R_{S}, in exemplary aspects, is the same as any one of those described herein (e.g., those described above in the subsection entitled: Ratio, R_{S}). Also, in exemplary aspects the threshold ratio R_{T} is the same as any one of those described herein in the section entitled Heart Failure and Methods Relating Thereto).

[0156] Methods Of Reducing Risk of HF

[0157] The invention additionally provides methods of reducing risk of HF in a subject. The method comprises determining a subject's risk for HF and treating the subject, when the subject has been determined to be at risk for HF. In exemplary embodiments, the methods of reducing risk of HF in a subject provided herein comprises the steps of (A) determining a ratio, Rₛ, which compares a level of a truncated SCN5A Exon 28 transcript of a biological sample obtained from the subject to (i) a level of a full length SCN5A Exon 28 transcript of the biological sample or (ii) a level of all SCN5A Exon 28 transcripts of the biological sample or (iii) a level of a full length SCN5A Exon 28 transcript and a level or one or more truncated SCN5A Exon 28 transcripts of the biological sample; and (B) providing therapy to the subject, when R_{S} is greater than or equal to a threshold ratio, R_{T}.

[0158] With regard to the methods of reducing a subject's risk for HF provided herein, R_{S}, in exemplary aspects, is the same as any one of those described herein (e.g., those described above in the subsection entitled: Ratio, R_{S}). Also, in exemplary aspects the threshold ratio R_{T} is the same as any one of those described herein in the section entitled Heart Failure and Methods Relating Thereto).

[0159] Therapy For Heart Failure

[0160] Anti-HF therapies are known in the art. See, e.g., Abraham and Krum, “Heart

Failure: A Practical Approach to Treatment,” McGraw Hill Professional, 2007. The anti-HF therapy in exemplary aspects includes administration of one of more of: Angiotensin converting enzyme (ACE) inhibitors, Angiotensin II receptor blockers (ARBs), Beta-blockers, Digoxin, Diuretics, Blood vessel dilators, Potassium or magnesium, Aldactone Inhibitors, Calcium channel blockers, and Heart pump medication. In exemplary aspects, the anti-HF therapy includes one or more surgical procedures, including, but not limited to: bypass surgery, left ventricular assist device, heart valve surgery, infarct exclusion surgery, heart transplant.

[0161] Arrhythmia and Methods Related Thereto

[0162] Arrhythmias

[0163] The invention moreover provides a method of determining a subject's risk for arrhythmia. As used herein, the term “arrhythmia” is synonymous with “cardiac dysrhythmia” or “cardiac arrhythmia” and refers to any condition in which there is abnormal electrical activity in the heart. In exemplary embodiments, the cardiac arrhythmia is a ventricular arrhythmia, such as ventricular fibrillation, ventricular tachycardia, or an arrhythmic condition in which both ventricular fibrillation and ventricular tachycardia are present. In exemplary embodiments, the cardiac arrhythmia is an atrial arrhythmia, e.g., an atrial fibrillation, atrial tachycardia, or an arrhythmic condition in which both atrial fibrillation and atrial tachycardia are present. Other types of cardiac arrhythmias are described below.

[0164] In exemplary aspects, the cardiac arrhythmia is characterized by an abnormal heart rate. In exemplary aspects, the cardiac arrhythmia is characterized by a bradycardia or a tachycardia.

[0165] Bradycardia

[0166] In exemplary aspects, the cardiac arrhythmia is a bradycardia in which the resting heart rate is slower than normal. In exemplary aspects, the bradycardia is characterized by a resting heart rate in an adult human which is slower than 60 beats per minute. In exemplary aspects, the bradycardia is a sinus bradycardia. In exemplary aspects, the bradycardia is caused by sinus arrest or AV block or heart block. In exemplary aspects, the bradycardia is caused by a slowed electrical conduction in the heart. In exemplary aspects, the bradycardia is not the bradycardia which is exhibited by the normally functioning heart of an athlete or athletic person.

[0167] Tachycardia

[0168] In exemplary aspects, the cardiac arrhythmia is a tachycardia in which the resting heart rate is faster than normal. In exemplary aspects, the tachycardia is characterized by a resting heart rate in an adult human which is faster than 100 beats per minute. In exemplary aspects, the tachycardia is a sinus tachycardia. In exemplary aspects, the sinus tachycardia is not caused by physical exercise, emotional stress, hyperthyroidism, ingestion or injection of substances, such as caffeine or amphetamines. In exemplary aspects, the tachycardia is not a sinus tachycardia, e.g., a tachycardia resulting from automaticity, reentry (e.g., fibrillation), or triggered activity. In exemplary aspects, the tachycardia is caused by a slowed electrical conduction in the heart. In exemplary aspects, the tachycardia is caused by an ectopic focus. In exemplary aspects, the tachycardia is combined with abnormal rhythm.

[0169] In exemplary aspects, the cardiac arrhythmia is characterized by the mechanism by which it occurs. In exemplary aspects, the cardiac arrhythmia is caused by automaticity, re-entry, or fibrillation.

[0170] Automaticity

[0171] In exemplary aspects, the cardiac arrhythmia is an abnormal rhythm or a tachycardia caused by automaticity, a condition in which a cardiac muscle cell other than a cardiac muscle of the conduction system fires an impulse of its own. In exemplary aspects, the cardiac arrhythmia is caused by a muscle cell, other than a cell of the sino-atrial (SA) node, atrial-ventricular (AV) node, Bundle of His, or Purkinje fibers, firing an impulse of its own.

[0172] Re-Entry

[0173] In exemplary aspects, the cardiac arrhythmia is a re-entry arrhythmia in which an electrical impulse recurrently travels in a circle within the heart, rather than moving from one end of the heart to the other and then stopping. In exemplary aspects, the cardiac arrhythmia is a cardiac flutter, a paroxysmal supraventricular tachycardia, or a ventricular tachycardia.

[0174] Fibrillation

[0175] In exemplary aspects, the cardiac arrhythmia is a fibrillation. In exemplary aspects, the fibrillation is an atrial fibrillation. In exemplary aspects, the fibrillation is a ventricular fibrillation.

[0176] Triggered Beats

[0177] In exemplary aspects, the cardiac arrhythmia is a triggered beat that occurs when ion channels in the heart cells malfunction, resulting in abnormal propagation of electrical activity and possibly leading to abnormal rhythm.

[0178] In exemplary embodiments, the cardiac arrhythmia is classified by site of origin. In exemplary aspects, the cardiac arrhythmia is an atrial arrhythmia (e.g., premature atrial contraction, wandering atrial pacemaker, multifocal atrial tachycardia, atrial flutter, atrial fibrillation). In exemplary aspects, the cardiac arrhythmia is a junction arrhythmia (e.g., supraventricular tachycardia, AV nodal reentral tachycardia, paroxysmal supraventricular tachycardia, junctional rhythm, junctional tachycardia, premature junctional complex). In exemplary aspects, the cardiac arrhythmia is an atrio-ventricular arrhythmia (e.g., AV reentrant tachycardia). In exemplary aspects, the cardiac arrhythmia is a ventricular arrhythmia (e.g., premature ventricular contraction or ventricular extra beat, accelerated idoventricular rhythm, monomorphic ventricular tachycardia, polymorphic ventricular tachycardia, ventricular fibrillation). In exemplary aspects, the cardiac arrhythmia is a heart block (e.g., first degree heart block, Type I second degree heart block, Type 2 second degree heart block, third degree heat block). In exemplary aspects, the cardiac arrhythmia is a premature contraction.

[0179] In exemplary aspects, the cardiac arrhythmia is a condition in which two or more types of cardiac arrhythmias are present. In exemplary aspects, the cardiac arrhythmia is a condition in which both ventricular tachycardia and ventricular fibrillation are present. In exemplary aspects, the cardiac arrhythmia is a condition in which a bradycardia is not present.

[0180] In exemplary aspects, the methods of determining a subject's risk for arrhythmia comprises the step of determining a ratio, Rₛ, which compares a level of a truncated SCN5A Exon 28 transcript of a biological sample obtained from the subject to (i) a level of a full length SCN5A Exon 28 transcript of the biological sample or (ii) a level of all SCN5A Exon 28 transcripts of the biological sample or (iii) a level of a full length SCN5A Exon 28 transcript and a level or one or more truncated SCN5A Exon 28 transcripts of the biological sample. In exemplary aspects, the subject is determined to be at risk for arrhythmia, when R_{S} is greater than or equal to a threshold ratio, R_{T}.

[0181] With regard to the methods of determining a subject's risk for arrhythmia provided herein, R_{S}, in exemplary aspects, is the same as any one of those described herein (e.g., those described above in the subsection entitled: Ratio, R_{S}). The threshold ratio R_{T} is essentially the same as those described herein (e.g., those described above in the section entitled Threshold Ratio, R_{T}), except that, in some instances, the control sample, or control subject, or subject is different from those described in that section. For example, in respect to the methods of determining a subject's risk for HF provided herein, R_{T} in exemplary aspects is a ratio that compares a level of a truncated SCN5A Exon 28 transcript of a biological sample to (i) a level of a full length SCN5A Exon 28 transcript of the biological sample or (ii) a level of all SCN5A Exon 28 transcripts of the biological sample or (iii) a level of a full length SCN5A Exon 28 transcript and a level or one or more truncated SCN5A Exon 28 transcripts of the biological sample, wherein the biological sample is obtained from a control subject known as (i) not having an ICD, (ii) not having a cardiac disease, e.g., heart failure, (iii) having normal left ventricular function, (iv) not having diastolic dysfunction, or (v) a combination thereof.

[0182] In alternative aspects, R_{T}=μ+4.0σ, wherein μ=is the mean value of a Gaussian distribution of a set of data values, wherein each data value of the set represents a ratio that compares a level of a truncated SCN5A Exon 28 transcript of a biological sample obtained from a control subject to (i) a level of a full length SCN5A Exon 28 transcript of the biological sample or (ii) a level of all SCN5A Exon 28 transcripts of the biological sample or (iii) a level of a full length SCN5A Exon 28 transcript and a level or one or more truncated SCN5A Exon 28 transcripts of the biological sample of the control subject, wherein the control subject is a subject known as (i) not having an ICD, (ii) not having a cardiac disease, e.g., heart failure, (iii) having normal left ventricular function, (iv) not having diastolic dysfunction, or (v) a combination thereof, and wherein σ is the standard deviation of the Gaussian distribution of the data values. In exemplary aspects, the ratio that compares a level of a truncated SCN5A Exon 28 transcript of a biological sample obtained from a control subject to (i) a level of a full length SCN5A Exon 28 transcript of the biological sample or (ii) a level of all SCN5A Exon 28 transcripts of the biological sample or (iii) a level of a full length SCN5A Exon 28 transcript and a level or one or more truncated SCN5A Exon 28 transcripts of the biological sample obtained from the control subject is matched to the R_{S} to which it is being compared.

[0183] Alternatively, R_{T}=μ−Xσ, wherein μ=is the mean value of a Gaussian distribution of a set of data values, wherein each data value of the set represents a ratio that compares a level of a truncated SCN5A Exon 28 transcript of a biological sample obtained from a control subject to (i) a level of a full length SCN5A Exon 28 transcript of the biological sample or (ii) a level of all SCN5A Exon 28 transcripts of the biological sample or (iii) a level of a full length SCN5A Exon 28 transcript and a level or one or more truncated SCN5A Exon 28 transcripts of the biological sample of the control subject, wherein the control subject is a subject known as having arrhythmia, wherein σ is the standard deviation of the Gaussian distribution of the data values, and X is a number between about 0.7 and about 4.0 (e.g., 0.7, 0.8, 0.9, 1.0, 1.1, 1.2, 1.3, 1.4, 1.5, 1.6, 1.7, 1.8, 1.9, 2.0, 2.1, 2.2, 2.3, 2.4, 2.5, 2.6, 2.7, 2.8, 2.9, 3.0, 3.1, 3.2, 3.3, 3.4, 3.5, 3.6, 3.7, 3.8, 3.9, 4.0). In exemplary aspects, X is a number between about 0.7 and about 1.0 or a number between about 2.0 and about 4.0 or a number between about 2.3 and about 4.0. In exemplary aspect, X is 2.326.

[0184] In exemplary aspects, when R_{T}=μ−Xσ, each data value of the set represents a ratio that compares a level of a truncated SCN5A Exon 28 transcript of a biological sample obtained from a control subject to (i) a level of a full length SCN5A Exon 28 transcript of the biological sample or (ii) a level of all SCN5A Exon 28 transcripts of the biological sample or (iii) a level of a full length SCN5A Exon 28 transcript and a level or one or more truncated SCN5A Exon 28 transcripts of the biological sample of the control subject, and the ratio is

$$\frac{Truncated SCN 5 A Exon 28 transcript}{Full length SCN 5 A Exon 28 transcript} = \frac{\begin{matrix}Calibrated abundance of truncated \\ SCN 5 A Exon 28 transcript\end{matrix}}{\begin{matrix}Calibrated abundance of full length \\ SCN 5 A Exon 28 transcript\end{matrix}}$$

wherein:

calibrated abundance of truncated SCN5A Exon 28 transcript=2^{-ΔΔCttruncated SCN5A Exon 28 transcript}

calibrated abundance of full length SCN5A Exon 28 transcript=2^{-ΔΔCtfull length SCN5A Exon 28 transcript}

ΔΔCt_{full length SCN5A Exon 28 transcript}=ΔCt_{full length}−ΔCt_{housekeeping gene}

ΔΔCt_{truncated SCN5A Exon 28 transcript}=ΔCt_{truncated}−ΔCt_{housekeeping gene}

ΔCt_{full length}=([Ct of full length SCN5A Exon 28 transcript of arrhythmia patient sample]−[Ct of full length SCN5A Exon 28 transcript of control sample])

ΔCt_{truncated}=([Ct of truncated SCN5A Exon 28 transcript of arrhythmia patient sample]−[Ct of truncated SCN5A Exon 28 transcript of control sample])

ΔCt_{housekeeping gene}=([Ct of housekeeping gene of arrhythmia patient sample]−[Ct of housekeeping gene of control sample]).

wherein “arrhythmia patient sample” is a biological sample obtained from a subject known as having arrhythmia and “control sample” is a biological sample obtained from a control subject known as (i) not having an ICD, (ii) not having a cardiac disease, e.g., arrhythmia, (iii) having normal left ventricular function, (iv) not having diastolic dysfunction, or (v) a combination thereof, wherein “full length” refers to WT SCN5A Exon 28 transcripts or E28A-S transcripts or both WT SCN5A Exon 28 transcripts and E28A-S transcripts.

[0185] In exemplary aspects, when R_{T}=μ−Xσ, each data value of the set represents a ratio that compares a level of a truncated SCN5A Exon 28 transcript of a biological sample obtained from a control subject to (i) a level of a full length SCN5A Exon 28 transcript of the biological sample or (ii) a level of all SCN5A Exon 28 transcripts of the biological sample or (iii) a level of a full length SCN5A Exon 28 transcript and a level or one or more truncated SCN5A Exon 28 transcripts of the biological sample of the control subject, and the ratio is

$$\frac{Truncated SCN 5 A Exon 28 transcript}{All SCN 5 A Exon 28 transcripts} = \frac{Calibrated abundance of truncated SCN 5 A Exon 28 transcript}{Calibrated abundance of all SCN 5 A Exon 28 transcripts}$$

wherein:

calibrated abundance of truncated SCN5A Exon 28 transcript=2^{-ΔΔCttruncated SCN5A Exon 28 transcript}

calibrated abundance of all SCN5A Exon 28 transcripts=2^{-ΔΔCtall SCN5A Exon 28 transcripts}

ΔΔCt_{all SCN5A Exon 28 transcripts}=ΔCt_{all SCN5A Exon 28 transcripts}−ΔCt_{housekeeping gene}

ΔΔCt_{truncated SCN5A Exon 28 transcript}=ΔCt_{truncated}−ΔCt_{housekeeping gene}

ΔCt_{all SCN5A Exon 28 transcripts}=([Ct of all SCN5A Exon 28 transcripts of arrhythmia patient sample]−[Ct of all SCN5A Exon 28 transcripts of control sample])

ΔCt_{truncated}=([Ct of truncated SCN5A Exon 28 transcript of arrhythmia patient sample]−[Ct of truncated SCN5A Exon 28 transcript of control sample])

ΔCt_{housekeeping gene}=([Ct of housekeeping gene of arrhythmia patient sample]−[Ct of housekeeping gene of control sample])

wherein “arrhythmia patient sample” is a biological sample obtained from a subject known as having heart failure and “control sample” is a biological sample obtained from a control subject known as (i) not having an ICD, (ii) not having a cardiac disease, e.g., arrhythmia, (iii) having normal left ventricular function, (iv) not having diastolic dysfunction, or (v) a combination thereof, wherein “all SCN5A Exon 28 transcripts” refers to all of WT, E28A-S, E28B, E28C, and E28D.

[0186] In exemplary aspects, R_{T} is determined by a system. In exemplary aspects, the system comprises a processor and a memory device coupled to the processor, wherein the memory device stores machine readable instructions that, when executed by the processor, cause the processor to:
[0187] (i) receive a plurality of data values, each data value is a ratio determined from a biological sample obtained from a subject of a first population, wherein the ratio compares a level of a truncated SCN5A Exon 28 transcript to (a) a level of a full length SCN5A Exon 28 transcript of the biological sample or (b) a level of all SCN5A Exon 28 transcripts of the biological sample or (c) a level of a full length SCN5A Exon 28 transcript and a level or one or more truncated SCN5A Exon 28 transcripts of the biological sample, wherein each subject of the first population is a subject known as having arrhythmia;
[0188] (ii) fit the plurality of data values to a first Gaussian distribution;
[0189] (iii) determine a mean value, μ, and a standard deviation, ∝, of the first Gaussian distribution;
[0190] (iv) set a first threshold ratio, R_{T}, at μ−Xσ, wherein X is a number between 0.7 and 4.0.

[0191] Further descriptions of suitable systems that may be used to determine R_{T} is provided herein below.

[0192] Methods Of Monitoring Risk for Arrhythmia

[0193] In exemplary aspects, the step of determining a ratio, Rₛ, is repeated at least one, if not, two, or more times. In exemplary aspects, ratio, Rₛ is determined 2, 3, 4, 5, 6, 7, 8, 9 10, or more times. In such cases, the method may be considered as a method of monitoring a subject's risk for arrhythmia. In exemplary aspects, ratio, Rₛ is determined every 6 to 12 months (e.g., every 6, every 7 months, every 8 months, every 9 months, every 10 months, every 11 months, every 12 months months) and each time, Rₛ is based on a different biological sample obtained from the same subject.

[0194] Methods of Reducing Risk of Arrhythmia

[0195] The invention additionally provides methods of reducing risk of arrhythmia in a subject. The method comprises determining a subject's risk for arrhythmia and treating the subject, when the subject has been determined to be at risk for arrhythmia. In exemplary embodiments, the methods of reducing risk of arrhythmia in a subject provided herein comprises the steps of (A) determining a ratio, Rₛ, which compares a level of a truncated SCN5A Exon 28 transcript of a biological sample obtained from the subject to (i) a level of a full length SCN5A Exon 28 transcript of the biological sample or (ii) a level of all SCN5A Exon 28 transcripts of the biological sample or (iii) a level of a full length SCN5A Exon 28 transcript and a level or one or more truncated SCN5A Exon 28 transcripts of the biological sample; and (B) providing anti-arrhythmic therapy to the subject, when R_{S} is greater than or equal to a threshold ratio, R_{T}.

[0196] With regard to the methods of reducing a subject's risk for arrhythmia provided herein, R_{S}, in exemplary aspects, is the same as any one of those described herein (e.g., those described above in the subsection entitled: Ratio, R_{S}). Also, in exemplary aspects the threshold ratio R_{T} is the same as any one of those described herein in the section entitled Arrhythmia and Methods Relating Thereto). The anti-arrhythmic therapy provided in the methods of reducing risk for arrhythmia may be any suitable anti-arrhythmic therapy known in the art, some of which are described herein.

[0197] Methods of Determining Safe Use of a Therapeutic

[0198] The invention furthermore provides methods of determining whether administration of an anti-arrhythmic agent to a subject is safe. The method comprises determining a ratio R_{S} which compares a level of a truncated SCN5A Exon 28 transcript of a biological sample obtained from the subject to (i) a level of a full length SCN5A Exon 28 transcript of the biological sample or (ii) a level of all SCN5A Exon 28 transcripts of the biological sample or (iii) a level of a full length SCN5A Exon 28 transcript and a level or one or more truncated SCN5A Exon 28 transcripts of the biological sample. In exemplary aspects, when R_{S} is greater than or equal to a threshold ratio R_{T}, the administration of the anti-arrhythmic agent to the subject is safe.

[0199] With regard to the methods of determining whether administration of an anti-arrhythmic agent to a subject is safe provided herein, R_{S}, in exemplary aspects, is the same as any one of those described herein (e.g., those described above in the subsection entitled: Ratio, R_{S}). Also, in exemplary aspects the threshold ratio R_{T} is the same as any one of those described herein in the section entitled Threshold Ratio R_{T}). The anti-arrhythmic agent provided in the methods of reducing risk for arrhythmia may be any suitable anti-arrhythmic agent known in the art, some of which are described herein. In exemplary aspects, the anti-arrhythmic agent is a sodium channel blocking agent, e.g., NAD+, mitoTEMPO.

[0200] Levels of SCN5A Exon 28 Transcripts

[0201] The methods described herein reference one or more levels of SCN5A Exon 28 transcripts. The methods include, for example, a step of determining a ratio relating a level of a truncated SCN5A Exon 28 transcript of a biological sample to (i) a level of a full length SCN5A Exon 28 transcript of the biological sample or (ii) a level of all SCN5A Exon 28 transcripts of the biological sample or (iii) a level of a full length SCN5A Exon 28 transcript and a level or one or more truncated SCN5A Exon 28 transcripts of the biological sample. The levels of SCN5A Exon 28 transcripts may be determined or obtained by any suitable means. In exemplary aspects, the levels are determined by measuring the levels from a biological sample. For instance, any of a level of a full length transcript of the SCN5A gene and a level of a truncated SCN5A Exon 28 transcript may be measured using suitable techniques of measuring transcripts known in the art. The measurement of these levels may be a direct measurement of SCN5A Exon 28 transcripts. Such methods may be considered as involving the measurement of expression levels of the SCN5A Exon 28 transcripts. In exemplary aspects, the level that is measured is an mRNA transcript level, or a level of the product encoded by the mRNA transcript, e.g., a protein or peptide expression level. Suitable methods of determining expression levels of proteins are known in the art and include immunoassays (e.g., Western blotting, an enzyme-linked immunosorbent assay (ELISA), a radioimmunoassay (RIA), and immunohistochemical assay. Suitable methods of determining expression levels of nucleic acids (e.g., mRNA) are known in the art and include quantitative polymerase chain reaction (qPCR), including, but not limited to, real time PCR, Northern blotting and Southern blotting.

[0202] In alternative aspects, the measurement of SCN5A Exon 28 transcripts may be an indirect measurement, wherein something other than the SCN5A Exon 28 transcripts are measured. For example, the SCN5A Exon 28 transcript levels may determined by measuring an expression level or biological activity level of a related protein, e.g., a protein which acts upstream or downstream of the SCN5A Exon 28 transcript. For example, data provided herein evidence that splicing factors hLuc7A and RBM25, as well as the transducer of the unfolded protein response (UPR), PERK, are associated with abnormal splicing of the SCN5A gene. Accordingly, the levels may be determined by measuring expression levels of splicing factor hLuc7a, splicing factor RBM25 and/or PERK. The expression levels of splicing factor hLuc7a, splicing factor RBM25 and/or PERK may be measured by measurement of gene expression, or expression of the gene products (e.g., mRNA, protein). Accordingly, in exemplary aspects, the methods described herein may comprise measuring a level of splicing factor hLuc7a protein, splicing factor RBM25 protein and/or PERK protein or, a splicing factor hLuc7a mRNA, splicing factor RBM25 mRNA and/or PERK mRNA.

[0203] Luc7A (NCBI Gene ID No. 51747) is also known as LUC7L3; LUC7-like 3; CRA; CROP; LUCIA; hLuc7A; CREAP-1; and OA48-18. Exemplary mRNA sequences of hLuc7A are set forth herein as SEQ ID NOs: 34 and 35 but may also found in the NCBI's nucleotide database as Accession No. NM_{—}006107.3 and as Accession No. NM_{—}016424.4. Exemplary amino acid sequences of hLuc7A are set forth herein as SEQ ID NOs: 36 and 37 but may also be found in the NCBI's Protein database as Accession No. NP_{—}006098.2 and as Accesssion No. NP_{—}057508.2. RBM25 (NCBI Gene ID No. 58517) is also known RNA binding motif protein 25; 5164; NET52; RNPC7; Snu71; RED120; fSAP94; MGC105088; and MGC117168. An exemplary mRNA sequence of RBM25 is set forth herein as SEQ ID NO: 38 but may be found in the NCBI's nucleotide database as Accession No. NM_{—}021239.2. An exemplary amino acid sequence of RBM25 is set forth herein as SEQ ID NO: 39 but may be found in the NCBI's Protein database as Accession No. NP_{—}067062.1. PERK (NCBI Gene ID No. 9451) is also known as eukaryotic translation initiation factor 2-alpha kinase 3, EIF2AK3, protein kinase R-like endoplasmic reticulum kinase, PKR-like ER kinase; PEK; WRS; and DKFZp781H1925. An exemplary mRNA sequence of PERK is set forth herein as SEQ ID NO: 40 but may also be found on the NCBI's nucleotide database as Accession No. NM_{—}004836.5. An exemplary amino acid sequence of PERK is set forth herein as SEQ ID NO: 41 but may also be found on the NCBI's Protein database as Accession No. NP_{—}004827.4.

[0204] Also, for example, the SCN5A Exon 28 transcript levels may be determined by measuring an expression level or biological activity level of a chaperone protein (e.g., calnexin, CHOP), since these proteins are upregulated once the UPR is activated via PERK, which, in turn, is activated by the certain truncated SCN5A transcripts. Accordingly, in exemplary aspects, the methods described herein may comprise measuring a level of a chaperone protein in a biological sample. In exemplary embodiments, the chaperone protein is CHOP or calnexin.

[0205] In exemplary aspects, the chaperone protein is CHOP. CHOP (NCBI Gene ID No. 1649) is also known as DDIT3, DNA-damage-inducible transcript 3, CEBPZ; CHOP10; CHOP-10; GADD153; MGC4154. Exemplary amino acid sequences of CHOP are set forth herein as SEQ ID NOs: 42-47 but are also found in the NCBI's Protein database as Accession Nos. NP_{—}001181982.1, NP_{—}001181983.1, NP_{—}001181984.1, NP_{—}001181985.1, NP_{—}001181986.1, NP_{—}004074.2. Exemplary nucleotide sequences of CHOP are set forth herein as SEQ ID NO: 48-53 but are also found in the NCBI's Nucleotide database as Accession Nos. NM_{—}001195053.1, NM_{—}001195054.1, NM_{—}001195055.1, NM_{—}001195056.1, NM_{—}001195057.1, and NM_{—}004083.5.

[0206] In exemplary aspects, the chaperone protein is calnexin. Calnexin (NCBI Gene ID No. 821) is also known as CANX; CNX; P90; IP90; FLJ26570. Exemplary amino acid sequences of calnexin are set forth herein as SEQ ID NOs: 54 and 55 but are also found in the NCBI's Protein database as Accession Nos. NP_{—}001019820.1 and NP_{—}001737.1. Exemplary nucleotide sequences of Calnexin are set forth herein as SEQ ID NO: 56 and 57 but are also found in the NCBI's Nucleotide database as Accession Nos. NM_{—}001024649.1 and NM_{—}001746.3.

[0207] In the methods in which the level of splicing factor hLuc7a, splicing factor RBM25, PERK and/or a chaperone protein is measured, the level may be an expression level (e.g., a protein level, an mRNA level, gene expression level) of the splicing factor hLuc7a, splicing factor RBM25, PERK, or chaperone protein. Alternatively, the level may be a biological activity level, such as, an enzymatic activity level or a binding activity level. In exemplary aspects, the measurement may be made by measuring the amount of RBM25 bound to the SCN5A gene or gene transcript.

[0208] Medical Record

[0209] In exemplary aspects, the levels are determined by obtaining the levels from a medical record. For example, the levels may have been measured and recorded at a time prior to when the steps of the methods of the invention are carried out, e.g., prior to when R_{S} is determined. In exemplary aspects, the levels are obtained from a medical record of a subject containing levels that were measured and recorded no more than 6 months prior to the time at which the steps of the method of the invention are carried out. In exemplary aspects, the levels are obtained from a medical record of a subject containing levels that were measured and recorded no more than 5 months or 4 months or 3 months or 2 months prior to the time at which the steps of the method of the invention are carried out. In exemplary aspects, the levels are obtained from a medical record of a subject containing levels that were measured and recorded no more than 1 month or 3 weeks or 2 weeks or 1 week prior to the time at which the steps of the method of the invention are carried out.

[0210] In exemplary aspects, some of the levels are determined by obtaining the levels from a medical record and some are measured. In exemplary aspects, the method comprises the steps of measuring the level of a full length transcript of the SCN5A gene and obtaining from a medical record of the subject the level of a SNC5A splice variant produced from alternative splicing within Exon 28 of the SCN5A gene. Alternatively, the method comprises the steps of obtaining from a medical record of the subject the level of a full length transcript of the SCN5A gene and measuring the level of a SNC5A splice variant produced from alternative splicing within Exon 28 of the SCN5A gene.

[0211] Additional Steps

[0212] With regard to the methods of the invention, the methods may include additional steps. For example, the method may include repeating one or more of the recited step(s) of the method. Accordingly, in exemplary aspects, the method comprises re-determining a ratio R_{S}. In exemplary aspects, the method comprises re-determining a ratio R_{S} every 6 to 12 months, wherein the determination of each R_{S} is based on a different biological sample obtained from the same subject. In some aspects, the method comprises obtaining a biological sample from the subject every 6 to 12 months and determining the R_{S} of each biological sample obtained.

[0213] In exemplary aspects, the method comprises administering a therapeutic agent or device once the need therefor or a risk has been determined. For example, the methods described herein may optionally comprise a step of providing an appropriate therapy (administering a pharmaceutical agent or implementing a standard of care) to the subject determined to have a need therefor. In exemplary aspects, the methods of the invention comprise one or more steps related to providing the appropriate therapy. The methods may, for example, comprise a step of implanting an ICD into a subject, or administering to the subject an anti-arrhythmic agent. The anti-arrhythmic agent may be any one known in the art, some of which are described herein. The anti-arrhythmic agent may be administered to the subject by any suitable route of administration known in the art, some routes of which are described herein below.

[0214] In exemplary aspects, the method comprises determining the levels of SCN5A Exon 28 transcript in more than one way. In exemplary aspects, the method comprises the steps of (i) measuring the levels of SCN5A Exon 28 transcripts from a biological sample obtained from the subject and (ii) obtaining the levels of SCN5A Exon 28 transcripts from a medical record of the subject. In exemplary aspects, the method comprises measuring the levels of SCN5A Exon 28 transcript via measurement of SCN5A Exon 28 mRNA transcripts and via measurement of the protein products encoded by the SCN5A Exon 28 mRNA transcripts. In exemplary aspects, the method comprises measuring the levels of two, three, four, five, six, seven, eight, or all of the following: (i) SCN5A Exon 28 mRNA transcripts, (ii) SCN5A Exon 28 proteins, (iii) expression levels of hLuc7A, (iv) expression levels of RBM25, (v) binding levels of RBM25 to the SCN5A gene or gene transcript, (vi) expression levels of PERK (vii) biological activity levels of PERK, (viii) expression levels of a chaperone protein, (ix) biological activity levels of a chaperone protein. In exemplary aspects, the method comprises measuring the levels of more than one truncated SCN5A Exon 28 transcript, e.g., comprises measuring both E28C and E28D levels.

[0215] In exemplary aspects, the method comprises determining the levels of more than one type of truncated SCN5A Exon 28 transcript (e.g., E28C and E28D) and/or more than one type of full-length SCN5A Exon 28 transcript (e.g., E28A-S and WT SCN5A Exon 28).

[0216] Any and all possible combinations of the steps described herein are contemplated for purposes of the inventive methods.

[0217] Biological Samples

[0218] With regard to the methods disclosed herein, in some embodiments, the sample comprises a bodily fluid, including, but not limited to, blood, plasma, serum, lymph, breast milk, saliva, mucous, semen, vaginal secretions, cellular extracts, inflammatory fluids, cerebrospinal fluid, feces, vitreous humor, or urine obtained from the subject. In some aspects, the sample is a composite panel of at least two of the foregoing samples. In some aspects, the sample is a composite panel of at least two of a blood sample, a plasma sample, a serum sample, and a urine sample. In exemplary aspects, the sample comprises blood or a fraction thereof (e.g., plasma, serum, fraction obtained via leukopheresis). In exemplary aspects, the sample comprises white blood cells obtained from the subject. In exemplary aspects, the sample comprises only white blood cells. In exemplary aspects, the sample is muscle tissue (e.g., skeletal muscle tissue). In exemplary aspects, the sample is cardiac tissue (e.g., cardiac muscle tissue).

[0219] Subjects

[0220] With regard to the methods disclosed herein, the subject in exemplary aspects is a mammal, including, but not limited to, mammals of the order Rodentia, such as mice and hamsters, and mammals of the order Logomorpha, such as rabbits, mammals from the order Carnivora, including Felines (cats) and Canines (dogs), mammals from the order Artiodactyla, including Bovines (cows) and Swines (pigs) or of the order Perssodactyla, including Equines (horses). In some aspects, the mammals are of the order Primates, Ceboids, or Simoids (monkeys) or of the order Anthropoids (humans and apes). In some aspects, the mammal is a human.

[0221] Controls

[0222] In the methods described herein, the level that is determined may be the same as a control level or a cut off level or a threshold level, or may be increased or decreased relative to a control level or a cut off level or a threshold level. In some aspects, the control subject is a matched control of the same species, gender, ethnicity, age group, smoking status, BMI, current therapeutic regimen status, medical history, or a combination thereof, but differs from the subject being diagnosed in that the control does not suffer from the disease in question or is not at risk for the disease.

[0223] Relative to a control level, the level that is determined may an increased level. As used herein, the term “increased” with respect to level (e.g., expression level, biological activity level) refers to any % increase above a control level. The increased level may be at least or about a 5% increase, at least or about a 10% increase, at least or about a 15% increase, at least or about a 20% increase, at least or about a 25% increase, at least or about a 30% increase, at least or about a 35% increase, at least or about a 40% increase, at least or about a 45% increase, at least or about a 50% increase, at least or about a 55% increase, at least or about a 60% increase, at least or about a 65% increase, at least or about a 70% increase, at least or about a 75% increase, at least or about a 80% increase, at least or about a 85% increase, at least or about a 90% increase, at least or about a 95% increase, relative to a control level.

[0224] Relative to a control level, the level that is determined may a decreased level. As used herein, the term “decreased” with respect to level (e.g., expression level, biological activity level) refers to any % decrease below a control level. The decreased level may be at least or about a 5% decrease, at least or about a 10% decrease, at least or about a 15% decrease, at least or about a 20% decrease, at least or about a 25% decrease, at least or about a 30% decrease, at least or about a 35% decrease, at least or about a 40% decrease, at least or about a 45% decrease, at least or about a 50% decrease, at least or about a 55% decrease, at least or about a 60% decrease, at least or about a 65% decrease, at least or about a 70% decrease, at least or about a 75% decrease, at least or about a 80% decrease, at least or about a 85% decrease, at least or about a 90% decrease, at least or about a 95% decrease, relative to a control level.

[0225] Housekeeping Genes

[0226] For purposes herein, the levels of SCN5A transcripts are determined (either obtained or measured) and the levels are normalized or calibrated to a level of a housekeeping gene. The housekeeping gene in some aspects is β-actin or GAPDH. In exemplary aspects, the housekeeping gene is any one of those set forth in the sequence listing as SEQ ID NOs: 61-635 or any one of those set forth in Table A below.

TABLE A

| Accession | | SEQ |
|---|---|---|
| No. | Name | ID NO |
| NM_001101 | Actin, beta (ACTB) | 60 |
| NM_000034 | aldolase A, fructose-bisphosphate (ALDOA) | 61 |
| NM_002046 | Glyceraldehyde-3-phosphate dehydrogenase (GAPDH) | 62 |
| NM_000291 | Phosphoglycerate kinase 1 (PGK1) | 63 |
| NM_005566 | Lactate dehydrogenase A (LDHA), | 64 |
| NM_002954 | Ribosomal protein S27a (RPS27A) | 65 |
| NM_000981 | Ribosomal protein L19 (RPL19) | 66 |
| NM_000975 | Ribosomal protein L11 (RPL11) | 67 |
| NM_007363 | Non-POU domain containing, octamer-binding (NONO) | 68 |
| NM_004309 | Rho GDP dissociation inhibitor (GDI) alpha (ARHGDIA) | 69 |
| NM_000994 | Ribosomal protein L32 (RPL32) | 70 |
| NM_022551 | Ribosomal protein S18 (RPS18), | 71 |
| NM_007355 | heat shock protein 90 kDa alpha (cytosolic), class B member 1 (HSP90AB1) | 72 |
| NM_004515 | Interleukin enhancer binding factor 2, 45 kDa (ILF2) | 73 |
| NM_004651 | Ubiquitin specific peptidase 11 (USP11) | 74 |
| NM_004888 | ATPase, H+ transporting, lysosomal 13 kDa, V1 subunit G1 (ATP6V1G1) | 75 |
| NM_003334 | Ubiquitin-like modifier activating enzyme 1 (UBA1) | 76 |
| NM_001320 | Casein kinase 2, beta polypeptide (CSNK2B) | 77 |
| NM_003915 | Copine I (CPNE1) | 78 |
| NM_001250 | CD40 molecule, TNF receptor superfamily member 5 (CD40) | 79 |
| NM_001904 | Catenin (cadherin-associated protein), beta 1, 88 kDa (CTNNB1) | 80 |
| NM_003753 | Eukaryotic translation initiation factor 3, subunit D (EIF3D) | 81 |
| NM_004541 | NADH dehydrogenase (ubiquinone) 1 alpha subcomplex, 1, 7.5 kDa (NDUFA1) | 82 |
| NM_001654 | V-raf murine sarcoma 3611 viral oncogene homolog (ARAF) | 83 |
| NM_002967 | Scaffold attachment factor B (SAFB) | 84 |
| NM_001183 | H+ transporting, lysosomal accessory protein 1 (ATP6AP1) | 85 |
| NM_003526 | Histone cluster 1, H2bc (HIST1H2BC) | 86 |
| NM_004718 | Cytochrome c oxidase subunit VIIa polypeptide 2 like (COX7A2L) | 87 |
| NM_004436 | Endosulfine alpha (ENSA) | 88 |
| NM_001207 | Basic transcription factor 3 (BTF3) | 89 |
| NM_004907 | Immediate early response 2 (IER2) | 90 |
| NM_004889 | ATP synthase, H+ transporting, mitochondrial Fo complex, subunit F2 (ATP5J2) | 91 |
| NM_003769 | Serine/arginine-rich splicing factor 9 (SRSF9) | 92 |
| NM_003910 | BUD31 homolog (S. cerevisiae) (BUD31) | 93 |
| NM_000100 | Cystatin B (stefin B) (CSTB) | 94 |
| NM_004785 | Solute carrier family 9 (sodium/hydrogen exchanger), member 3 regulator 2 (SLC9A3R2) | 95 |
| NM_001120 | Major facilitator superfamily domain containing 10 (MFSD10) | 96 |
| NM_000182 | Hydroxyacyl-CoA dehydrogenase/3-ketoacyl-CoA thiolase/enoyl-CoA hydratase (HADHA) | 97 |
| NM_003377 | Vascular endothelial growth factor B (VEGFB) | 98 |
| NM_003576 | Serine/threonine kinase 24 (STK24) | 99 |
| NM_000918 | Prolyl 4-hydroxylase, beta polypeptide (P4HB), | 100 |
| NM_004584 | RAD9 homolog A (S. pombe) (RAD9A) | 101 |
| NM_004952 | Ephrin-A3 (EFNA3) | 102 |
| NM_004308 | Rho GTPase activating protein 1 (ARHGAP1) | 103 |
| NM_003190 | TAP binding protein (tapasin) (TAPBP) | 104 |
| NM_004640 | DEAD (Asp-Glu-Ala-Asp) box polypeptide 39B (DDX39B) | 105 |
| NM_001064 | Transketolase (TKT) | 106 |
| NM_002117 | Major histocompatibility complex, class I, C (HLA-C) | 107 |
| NM_004161 | RAB1A, member RAS oncogene family (RAB1A) | 108 |
| NM_003339 | Ubiquitin-conjugating enzyme E2D 2 (UBE2D2) | 109 |
| NM_003969 | Ubiquitin-conjugating enzyme E2M (UBE2M) | 110 |
| NM_000516 | GNAS complex locus (GNAS) | 111 |
| NM_002819 | Polypyrimidine tract binding protein 1 (PTBP1) | 112 |
| NM_001001 | Ribosomal protein L36a-like (RPL36AL) | 113 |
| NM_004649 | Chromosome 21 open reading frame 33 (C21orf33), nuclear gene encoding mitochondrial protein | 114 |
| NM_000175 | Glucose-6-phosphate isomerase (GPI) | 115 |
| NM_001867 | Cytochrome c oxidase subunit VIIc (COX7C) | 116 |
| NM_001967 | Eukaryotic translation initiation factor 4A2 (EIF4A2) | 117 |
| NM_001863 | Cytochrome c oxidase subunit VIb polypeptide 1 (ubiquitous) (COX6B1) | 118 |
| NM_001997 | Finkel-Biskis-Reilly murine sarcoma virus (FBR-MuSV) ubiquitously expressed (FAU) | 119 |
| NM_002088 | Glutamate receptor, ionotropic, kainate 5 (GRIK5) | 120 |
| NM_001862 | Cytochrome c oxidase subunit Vb (COX5B) | 121 |
| NM_004255 | Cytochrome c oxidase subunit Va (COX5A) | 122 |
| NM_001788 | Septin 7 (SEPT7) | 123 |
| NM_004781 | Vesicle-associated membrane protein 3 (cellubrevin) (VAMP3) | 124 |
| NM_003801 | Glycosylphosphatidylinositol anchor attachment protein 1 homolog (yeast) (GPAA1) | 125 |
| NM_004643 | Poly(A) binding protein, nuclear 1 (PABPN1) | 126 |
| NM_001537 | Heat shock factor binding protein 1 (HSBP1) | 127 |
| NM_003680 | Tyrosyl-tRNA synthetase (YARS) | 128 |
| NM_003345 | Ubiquitin-conjugating enzyme E2I (UBE2I) | 129 |
| NM_002568 | Poly(A) binding protein, cytoplasmic 1 (PABPC1) | 130 |
| NM_001487 | Biogenesis of lysosomal organelles complex-1, subunit 1 (BLOC1S1) | 131 |
| NM_001861 | Cytochrome c oxidase subunit IV isoform 1 (COX4I1) | 132 |
| NM_004890 | Sperm associated antigen 7 (SPAG7) | 133 |
| NM_002812 | Proteasome (prosome, macropain) 26S subunit, non-ATPase, 8 (PSMD8) | 134 |
| NM_004926 | Zinc finger protein 36, C3H type-like 1 (ZFP36L1) | 135 |
| NM_002539 | Ornithine decarboxylase 1 (ODC1) | 136 |
| NM_000979 | Ribosomal protein L18 (RPL18) | 137 |
| NM_000977 | Ribosomal protein L13 (RPL13) | 138 |
| NM_001015 | Ribosomal protein S11 (RPS11) | 139 |
| NM_001760 | Cyclin D3 (CCND3) | 140 |
| NM_003973 | Ribosomal protein L14 (RPL14) | 141 |
| NM_002815 | Proteasome (prosome, macropain) 26S subunit, non-ATPase, 11 (PSMD11) | 142 |
| NM_000367 | Thiopurine S-methyltransferase (TPMT | 143 |
| NM_000973 | Ribosomal protein L8 (RPL8) | 144 |
| NM_004689 | Metastasis associated 1 (MTA1), | 145 |
| NM_001848 | Collagen, type VI, alpha 1 (COL6A1) | 146 |
| NM_004068 | Adaptor-related protein complex 2, mu 1 subunit (AP2M1) | 147 |
| NM_001687 | ATP synthase, H+ transporting, mitochondrial F1 complex, delta subunit (ATP5D) | 148 |
| NM_004197 | Serine/threonine kinase 19 (STK19) | 149 |
| NM_001028 | Ribosomal protein S25 (RPS25) | 150 |
| NM_001022 | Ribosomal protein S19 (RPS19) | 151 |
| NM_004759 | Mitogen-activated protein kinase-activated protein kinase 2 (MAPKAPK2) | 152 |
| NM_001623 | Allograft inflammatory factor 1 (AIF1) | 153 |
| NM_004894 | Chromosome 14 open reading frame 2 (C14orf2) | 154 |
| NM_002375 | Microtubule-associated protein 4 (MAP4) | 155 |
| NM_001013 | Ribosomal protein S9 (RPS9) | 156 |
| NM_003779 | UDP-Gal:betaGlcNAc beta 1,4-galactosyltransferase, polypeptide 3 (B4GALT3) | 157 |
| NM_001296 | Chemokine binding protein 2 (CCBP2) | 158 |
| NM_001009 | Ribosomal protein S5 (RPS5) | 159 |
| NM_003021 | Small glutamine-rich tetratricopeptide repeat (TPR)-containing, alpha (SGTA) | 160 |
| NM_004285 | Hexose-6-phosphate dehydrogenase (glucose 1-dehydrogenase) (H6PD), | 161 |
| NM_004142 | Matrix metallopeptidase-like 1 (MMPL1) | 162 |
| NM_001950 | E2F transcription factor 4, p107/p130-binding (E2F4) | 163 |
| NM_003815 | ADAM metallopeptidase domain 15 (ADAM15) | 164 |
| NM_001119 | Adducin 1 (alpha) (ADD1) | 165 |
| NM_001111 | Adenosine deaminase, RNA-specific (ADAR) | 166 |
| NM_003466 | Paired box 8 (PAX8) | 167 |
| NM_001155 | Annexin A6 (ANXA6) | 168 |
| NM_003465 | Chitinase 1 (chitotriosidase) (CHIT1) | 169 |
| NM_003186 | Transgelin (TAGLN) | 170 |
| NM_000802 | Folate receptor 1 (adult) (FOLR1), | 171 |
| NM_004924 | Actinin, alpha 4 (ACTN4) | 172 |
| NM_002931 | Ring finger protein 1 (RING1) | 173 |
| NM_000020 | Activin A receptor type II-like 1 (ACVRL1), | 174 |
| NM_001785 | Cytidine deaminase (CDA) | 175 |
| NM_004339 | Pituitary tumor-transforming 1 interacting protein (PTTG1IP) | 176 |
| NM_003860 | Barrier to autointegration factor 1 (BANF1) | 177 |
| NM_000214 | Jagged 1 (JAG1) | 178 |
| NM_002167 | Inhibitor of DNA binding 3, dominant negative helix-loop-helix protein (ID3) | 179 |
| NM_001664 | Ras homolog gene family, member A (RHOA) | 180 |
| NM_003166 | Sulfotransferase family, cytosolic, 1A, phenol-preferring, member 3 (SULT1A3) | 181 |
| NM_001746 | Calnexin (CANX) | 182 |
| NM_001662 | ADP-ribosylation factor 5 (ARF5) | 183 |
| NM_001660 | ADP-ribosylation factor 4 (ARF4) | 184 |
| NM_001658 | ADP-ribosylation factor 1 (ARF1) | 185 |
| NM_003313 | Tissue specific transplantation antigen P35B (TSTA3) | 186 |
| NM_001494 | GDP dissociation inhibitor 2 (GDI2) | 187 |
| NM_003145 | Signal sequence receptor, beta (translocon-associated protein beta) (SSR2) | 188 |
| NM_001619 | Adrenergic, beta, receptor kinase 1 (ADRBK1) | 189 |
| NM_001420 | ELAV (embryonic lethal, abnormal vision, Drosophila)-like 3 (Hu antigen C) (ELAVL3) | 190 |
| NM_004930 | Capping protein (actin filament) muscle Z-line, beta (CAPZB) | 191 |
| NM_004596 | Small nuclear ribonucleoprotein polypeptide A (SNRPA) | 192 |
| NM_004168 | Succinate dehydrogenase complex, subunit A, flavoprotein (Fp) (SDHA) | 193 |
| NM_004156 | Protein phosphatase 2 (formerly 2A) | 194 |
| NM_004910 | Phosphatidylinositol transfer protein, membrane-associated 1 (PITPNM1) | 195 |
| NM_004517 | Integrin-linked kinase (ILK) | 196 |
| NM_004494 | Hepatoma-derived growth factor (HDGF) | 197 |
| NM_004121 | Gamma-glutamyltransferase 5 (GGT5) | 198 |
| NM_004404 | Septin 2 (SEPT2) | 199 |
| NM_004394 | Death-associated protein (DAP) | 200 |
| NM_004383 | c-src tyrosine kinase (CSK) | 201 |
| NM_004074 | Cytochrome c oxidase subunit VIIIA (ubiquitous) (COX8A) | 202 |
| NM_004039 | Annexin A2 (ANXA2) | 203 |
| NM_001053 | Somatostatin receptor 5 (SSTR5) | 204 |
| NM_001328 | C-terminal binding protein 1 (CTBP1) | 205 |
| NM_001273 | Chromodomain helicase DNA binding protein 4 (CHD4) | 206 |
| NM_003430 | Zinc finger protein 91 (ZNF91) | 207 |
| NM_003314 | Tetratricopeptide repeat domain 1 (TTC1) | 208 |
| NM_003217 | Transmembrane BAX inhibitor motif containing 6 (TMBIM6) | 209 |
| NM_003132 | Spermidine synthase (SRM) | 210 |
| NM_000199 | N-sulfoglucosamine sulfohydrolase (SGSH) | 211 |
| NM_002818 | Proteasome (prosome, macropain) activator subunit 2 (PA28 beta) (PSME2) | 212 |
| NM_002733 | Protein kinase, AMP-activated, gamma 1 non-catalytic subunit (PRKAG1) | 213 |
| NM_002631 | Phosphogluconate dehydrogenase (PGD) | 214 |
| NM_002574 | Peroxiredoxin 1 (PRDX1) | 215 |
| NM_002512 | Non-metastatic cells 2, protein (NM23B) expressed in (NME2) | 216 |
| NM_002455 | Metaxin 1 (MTX1) | 217 |
| NM_002444 | Moesin (MSN) | 218 |
| NM_000529 | Melanocortin 2 receptor (adrenocorticotropic hormone) (MC2R) | 219 |
| NM_003573 | latent transforming growth factor beta binding protein 4 (LTBP4) | 220 |
| NM_002315 | LIM domain only 1 (rhombotin 1) (LMO1) | 221 |
| NM_000884 | IMP (inosine 5′-monophosphate) dehydrogenase 2 (IMPDH2) | 222 |
| NM_003641 | Interferon induced transmembrane protein 1 (9-27) (IFITM1) | 223 |
| NM_000841 | Glutamate receptor, metabotropic 4 (GRM4) | 224 |
| NM_002070 | Guanine nucleotide binding protein (G protein), alpha inhibiting activity polypeptide 2 (GNAI2) | 225 |
| NM_001493 | GDP dissociation inhibitor 1 (GDI1) | 226 |
| NM_002048 | Growth arrest-specific 1 (GAS1) | 227 |
| NM_002032 | Ferritin, heavy polypeptide 1 (FTH1) | 228 |
| NM_001418 | Eukaryotic translation initiation factor 4 gamma, 2 (EIF4G2) | 229 |
| NM_001350 | Death-domain associated protein (DAXX) | 230 |
| NM_001843 | Contactin 1 (CNTN1) | 231 |
| NM_001728 | basigin (Ok blood group) (BSG) | 232 |
| NM_001667 | ADP-ribosylation factor-like 2 (ARL2) | 233 |
| NM_001659 | ADP-ribosylation factor 3 (ARF3) | 234 |
| NM_003746 | Dynein, light chain, LC8-type 1 (DYNLL1) | 235 |
| NM_002127 | Major histocompatibility complex, class I, G (HLA-G) | 236 |
| NM_004712 | Hepatocyte growth factor-regulated tyrosine kinase substrate (HGS) | 237 |
| NM_003475 | Ras association (RalGDS/AF-6) domain family (N-terminal) member 7 (RASSF7) | 238 |
| NM_004046 | ATP synthase, H+ transporting, mitochondrial F1 complex, alpha subunit 1, cardiac muscle (ATP5A1) | 239 |
| NM_001894 | Casein kinase 1, epsilon (CSNK1E) | 240 |
| NM_003795 | Sorting nexin 3 (SNX3) | 241 |
| NM_001909 | Cathepsin D (CTSD) | 242 |
| NM_002792 | Proteasome (prosome, macropain) subunit, alpha type, 7 (PSMA7) | 243 |
| NM_002799 | Proteasome (prosome, macropain) subunit, beta type, 7 (PSMB7) | 244 |
| NM_002300 | Lactate dehydrogenase B (LDHB) | 245 |
| NM_004176 | Sterol regulatory element binding transcription factor 1 (SREBF1) | 246 |
| NM_002796 | Proteasome (prosome, macropain) subunit, beta type, 4 (PSMB4) | 247 |
| NM_002794 | Proteasome (prosome, macropain) subunit, beta type, 2 (PSMB2) | 248 |
| NM_002793 | Proteasome (prosome, macropain) subunit, beta type, 1 (PSMB1) | 249 |
| NM_002473 | Myosin, heavy chain 9, non-muscle (MYH9) | 250 |
| NM_001810 | centromere protein B, 80 kDa (CENPB) | 251 |
| NM_002624 | Prefoldin subunit 5 (PFDN5) | 252 |
| NM_004710 | Synaptogyrin 2 (SYNGR2) | 253 |
| NM_001127 | Adaptor-related protein complex 1, beta 1 subunit (AP1B1) | 254 |
| NM_002107 | H3 histone, family 3A (H3F3A) | 255 |
| NM_003899 | Rho guanine nucleotide exchange factor (GEF) 7 (ARHGEF7) | 256 |
| NM_003406 | Tyrosine 3-monooxygenase/tryptophan 5-monooxygenase activation protein (YWHAZ) | 257 |
| NM_002419 | Mitogen-activated protein kinase kinase kinase 11 (MAP3K11) | 258 |
| NM_001130 | Amino-terminal enhancer of split (AES) | 259 |
| NM_003379 | Ezrin (EZR) | 260 |
| NM_002636 | PHD finger protein 1 (PHF1) | 261 |
| NM_002622 | Prefoldin subunit 1 (PFDN1) | 262 |
| NM_001823 | Creatine kinase, brain (CKB) | 263 |
| NM_003405 | Tyrosine 3-monooxygenase/tryptophan 5-monooxygenase activation protein (YWHAH) | 264 |
| NM_002939 | Ribonuclease/angiogenin inhibitor 1 (RNH1) | 265 |
| NM_003562 | Solute carrier family 25 (mitochondrial carrier; oxoglutarate carrier), member 11 (SLC25A11) | 266 |
| NM_001916 | Cytochrome c-1 (CYC1) | 267 |
| NM_002823 | Prothymosin, alpha (PTMA) | 268 |
| NM_003096 | Small nuclear ribonucleoprotein polypeptide G (SNRPG) | 269 |
| NM_003321 | Tu translation elongation factor, mitochondrial (TUFM) | 270 |
| NM_003404 | Tyrosine 3-monooxygenase/tryptophan 5-monooxygenase activation protein (YWHAB) | 271 |
| NM_002946 | Replication protein A2, 32 kDa (RPA2) | 272 |
| NM_004356 | CD81 molecule (CD81) | 273 |
| NM_001743 | Calmodulin 2 (phosphorylase kinase, delta) (CALM2) | 274 |
| NM_004231 | ATPase, H+ transporting, lysosomal 14 kDa, V1 subunit F (ATP6V1F) | 275 |
| NM_004893 | H2A histone family, member Y (H2AFY) | 276 |
| NM_004146 | NADH dehydrogenase (ubiquinone) 1 beta subcomplex, 7, 18 kDa (NDUFB7) | 277 |
| NM_002128 | High mobility group box 1 (HMGB1) | 278 |
| NM_002002 | Fc fragment of IgE, low affinity II, receptor for (CD23) (FCER2) | 279 |
| NM_000858 | Guanylate kinase 1 (GUK1) | 280 |
| NM_001469 | X-ray repair complementing defective repair in Chinese hamster cells 6 (XRCC6) | 281 |
| NM_003766 | Beclin 1, autophagy related (BECN1) | 282 |
| NM_003906 | Minichromosome maintenance complex component 3 associated protein (MCM3AP) | 283 |
| NM_000757 | Colony stimulating factor 1 (macrophage) (CSF1) | 284 |
| NM_002149 | Hippocalcin-like 1 (HPCAL1) | 285 |
| NM_001694 | H+ transporting, lysosomal 16 kDa, V0 subunit c (ATP6V0C) | 286 |
| NM_004047 | H+ transporting, lysosomal 21 kDa, V0 subunit b (ATP6V0B) | 287 |
| NM_001696 | ATPase, H+ transporting, lysosomal 31 kDa, V1 subunit E1 (ATP6V1E1) | 288 |
| NM_001865 | Cytochrome c oxidase subunit VIIa polypeptide 2 (liver) (COX7A2) | 289 |
| NM_004373 | Cytochrome c oxidase subunit VIa polypeptide 1 (COX6A1) | 290 |
| NM_000801 | FK506 binding protein 1A | 291 |
| NM_000992 | Ribosomal protein L29 (RPL29) | 292 |
| NM_000988 | Ribosomal protein L27 (RPL27) | 293 |
| NM_001004 | ribosomal protein, large, P2 (RPLP2) | 294 |
| NM_001003 | Ribosomal protein, large, P1 (RPLP1) | 295 |
| NM_000405 | GM2 ganglioside activator (GM2A) | 296 |
| NM_000967 | Ribosomal protein L3 (RPL3) | 297 |
| NM_001428 | Enolase 1, (alpha) (ENO1) | 298 |
| NM_000999 | Ribosomal protein L38 (RPL38) | 299 |
| NM_000997 | Ribosomal protein L37 (RPL37) | 300 |
| NM_000995 | Ribosomal protein L34 (RPL34) | 301 |
| NM_002948 | Ribosomal protein L15 (RPL15) | 302 |
| NM_002952 | Ribosomal protein S2 (RPS2) | 303 |
| NM_001026 | Ribosomal protein S24 (RPS24) | 304 |
| NM_001020 | Ribosomal protein S16 (RPS16) | 305 |
| NM_001018 | Ribosomal protein S15 (RPS15) | 306 |
| NM_001017 | Ribosomal protein S13 (RPS13) | 307 |
| NM_000969 | Ribosomal protein L5 (RPL5) | 308 |
| NM_000985 | Ribosomal protein L17 (RPL17) | 309 |
| NM_000937 | Polymerase (RNA) II (DNA directed) polypeptide A, 220 kDa (POLR2A) | 310 |
| NM_001016 | Ribosomal protein S12 (RPS12) | 311 |
| NM_002140 | Heterogeneous nuclear ribonucleoprotein K (HNRNPK) | 312 |
| NM_002138 | Heterogeneous nuclear ribonucleoprotein D (AU-rich element RNA binding protein 1, 37 kDa) | 313 |
| | (HNRNPD) | |
| NM_004499 | Heterogeneous nuclear ribonucleoprotein A/B (HNRNPAB) | 314 |
| NM_001014 | Ribosomal protein S10 (RPS10) | 315 |
| NM_002383 | MYC-associated zinc finger protein (purine-binding transcription factor) (MAZ) | 316 |
| NM_002467 | V-myc myelocytomatosis viral oncogene homolog (avian) (MYC) | 317 |
| NM_001436 | Fibrillarin (FBL) | 318 |
| NM_004069 | Adaptor-related protein complex 2, sigma 1 subunit (AP2S1) | 319 |
| NM_001614 | Actin, gamma 1 (ACTG1) | 320 |
| NM_002355 | Mannose-6-phosphate receptor (cation dependent) (M6PR) | 321 |
| NM_004597 | Small nuclear ribonucleoprotein D2 polypeptide 16.5 kDa (SNRPD2) | 322 |
| NM_002308 | Lectin, galactoside-binding, soluble, 9 (LGALS9) | 323 |
| NM_000398 | Cytochrome b5 reductase 3 (CYB5R3) | 324 |
| NM_000754 | Catechol-O-methyltransferase (COMT) | 325 |
| NM_002406 | Mannosyl (alpha-1,3-)-glycoprotein beta-1,2-N-acetylglucosaminyltransferase (MGAT1) | 326 |
| NM_003752 | Eukaryotic translation initiation factor 3, subunit C (EIF3C) | 327 |
| NM_001355 | D-dopachrome tautomerase (DDT) | 328 |
| NM_004960 | Fused in sarcoma (FUS) | 329 |
| NM_004729 | Zinc finger, BED-type containing 1 (ZBED1) | 330 |
| NM_004587 | Ribosome binding protein 1 homolog 180 kDa (dog) (RRBP1) | 331 |
| NM_004552 | NADH dehydrogenase (ubiquinone) Fe—S protein 5, 15 kDa (NADH-coenzyme Q reductase) | 332 |
| | (NDUFS5) | |
| NM_004450 | Enhancer of rudimentary homolog (Drosophila) (ERH) | 333 |
| NM_004048 | Beta-2-microglobulin (B2M) | 334 |
| NM_000239 | Lysozyme (LYZ) | 335 |
| NM_000269 | Non-metastatic cells 1, protein (NM23A) expressed in (NME1) | 336 |
| NM_000431 | Mevalonate kinase (MVK) | 337 |
| NM_001247 | Ectonucleoside triphosphate diphosphohydrolase 6 (putative) (ENTPD6) | 338 |
| NM_003365 | Ubiquinol-cytochrome c reductase core protein I (UQCRC1) | 339 |
| NM_003329 | Thioredoxin (TXN) | 340 |
| NM_001069 | Tubulin, beta 2A class IIa (TUBB2A) | 341 |
| NM_000356 | Treacher Collins-Franceschetti syndrome 1 (TCOF1) | 342 |
| NM_003134 | Signal recognition particle 14 kDa (homologous Alu RNA binding protein) (SRP14) | 343 |
| NM_003131 | Serum response factor (c-fos serum response element-binding transcription factor) (SRF) | 344 |
| NM_000454 | Superoxide dismutase 1 | 345 |
| NM_003091 | Small nuclear ribonucleoprotein polypeptides B and B1 (SNRPB) | 346 |
| NM_003089 | Small nuclear ribonucleoprotein 70 kDa (U1) (SNRNP70) | 347 |
| NM_003016 | Serine/arginine-rich splicing factor 2 (SRSF2) | 348 |
| NM_003952 | Ribosomal protein S6 kinase, 70 kDa, polypeptide 2 (RPS6KB2) | 349 |
| NM_002950 | Ribophorin I (RPN1) | 350 |
| NM_002743 | Protein kinase C substrate 80K-H (PRKCSH) | 351 |
| NM_002686 | Phenylethanolamine N-methyltransferase (PNMT) | 352 |
| NM_002654 | Pyruvate kinase, muscle (PKM2) | 353 |
| NM_002648 | Pim-1 oncogene (PIM1) | 354 |
| NM_002635 | solute carrier family 25 (mitochondrial carrier; phosphate carrier), member 3 (SLC25A3) | 355 |
| NM_002494 | NADH dehydrogenase (ubiquinone) 1, subcomplex unknown, 1, 6 kDa (NDUFC1) | 356 |
| NM_002488 | NADH dehydrogenase (ubiquinone) 1 alpha subcomplex, 2, 8 kDa (NDUFA2) | 357 |
| NM_002434 | N-methylpurine-DNA glycosylase (MPG) | 358 |
| NM_002415 | Macrophage migration inhibitory factor (glycosylation-inhibiting factor) (MIF) | 359 |
| NM_002227 | Janus kinase 1 (JAK1) | 360 |
| NM_001536 | Arginine methyltransferase 1 (PRMT1) | 361 |
| NM_000183 | Hydroxyacyl-CoA dehydrogenase/3-ketoacyl-CoA thiolase/enoyl-CoA hydratase (HADHB) | 362 |
| NM_002085 | Glutathione peroxidase 4 (phospholipid hydroperoxidase) (GPX4) | 363 |
| NM_001502 | Glycoprotein 2 (zymogen granule membrane) (GP2) | 364 |
| NM_002080 | Glutamic-oxaloacetic transaminase 2, mitochondrial (aspartate aminotransferase 2) (GOT2) | 365 |
| NM_001440 | Exostoses (multiple)-like 3 (EXTL3) | 366 |
| NM_003754 | Eukaryotic translation initiation factor 3, subunit F (EIF3F) | 367 |
| NM_003755 | Eukaryotic translation initiation factor 3, subunit G (EIF3G) | 368 |
| NM_003757 | Eukaryotic translation initiation factor 3, subunit I (EIF3I) | 369 |
| NM_001360 | 7-dehydrocholesterol reductase (DHCR7) | 370 |
| NM_001344 | Defender against cell death 1 (DAD1) | 371 |
| NM_001914 | Cytochrome b5 type A (microsomal) (CYB5A) | 372 |
| NM_001834 | Clathrin, light chain B (CLTB) | 373 |
| NM_001833 | Clathrin, light chain A (CLTA) | 374 |
| NM_001281 | Tubulin folding cofactor B (TBCB) | 375 |
| NM_001749 | Calpain, small subunit 1 (CAPNS1) | 376 |
| NM_001697 | ATP synthase, H+ transporting, mitochondrial F1 complex, O subunit (ATP5O) | 377 |
| NM_001689 | ATP synthase, H+ transporting, mitochondrial Fo complex, subunit C3 (subunit 9) (ATP5G3) | 378 |
| NM_001675 | Activating transcription factor 4 (tax-responsive enhancer element B67) (ATF4) | 379 |
| NM_001642 | Amyloid beta (A4) precursor-like protein 2 (APLP2) | 380 |
| NM_014724 | Zinc finger protein 96 (ZNF96) | 381 |
| NM_005494 | DnaJ (Hsp40) homolog, subfamily B, member 6 (DNAJB6) | 382 |
| NM_006597 | Heat shock 70 kDa protein 8 (HSPA8) | 383 |
| NM_006623 | Phosphoglycerate dehydrogenase (PHGDH) | 384 |
| NM_015646 | RAP1B, member of RAS oncogene family (RAP1B) | 385 |
| NM_016532 | Inositol polyphosphate-5-phosphatase K (INPP5K) | 386 |
| NM_015292 | extended synaptotagmin-like protein 1 (ESYT1) | 387 |
| NM_005870 | Sin3A-associated protein, 18 kDa (SAP18) | 388 |
| NM_006833 | COP9 constitutive photomorphogenic homolog subunit 6 (Arabidopsis) (COPS6) | 389 |
| NM_005718 | Actin related protein 2/3 complex, subunit 4, 20 kDa (ARPC4) | 390 |
| NM_005719 | Actin related protein 2/3 complex, subunit 3, 21 kDa (ARPC3) | 391 |
| NM_006372 | Synaptotagmin binding, cytoplasmic RNA interacting protein (SYNCRIP) | 392 |
| NM_005180 | BMI1 polycomb ring finger oncogene (BMI1) | 393 |
| NM_018975 | Telomeric repeat binding factor 2, interacting protein (TERF2IP) | 394 |
| NM_005731 | Actin related protein 2/3 complex, subunit 2, 34 kDa (ARPC2) | 395 |
| NM_020151 | StAR-related lipid transfer (START) domain containing 7 (STARD7) | 396 |
| NM_005103 | Fasciculation and elongation protein zeta 1 (zygin I) (FEZ1) | 397 |
| NM_012179 | F-box protein 7 (FBXO7) | 398 |
| NM_020360 | phospholipid scramblase 3 (PLSCR3) | 399 |
| NM_014891 | PDGFA associated protein 1 (PDAP1) | 400 |
| NM_005745 | B-cell receptor-associated protein 31 (BCAP31) | 401 |
| NM_005418 | suppression of tumorigenicity 5 (ST5) | 402 |
| NM_006262 | Peripherin (PRPH) | 403 |
| NM_133476 | Zinc finger protein 384 (ZNF384) | 404 |
| NM_006570 | Ras-related GTP binding A (RRAGA) | 405 |
| NM_006333 | C1D nuclear receptor corepressor (C1D) | 406 |
| NM_007285 | GABA(A) receptor-associated protein-like 2 (GABARAPL2) | 407 |
| NM_006354 | Transcriptional adaptor 3 (TADA3) | 408 |
| NM_014302 | Sec61 gamma subunit (SEC61G) | 409 |
| NM_006118 | HCLS1 associated protein X-1 (HAX1) | 410 |
| NM_012100 | Aspartyl aminopeptidase (DNPEP) | 411 |
| NM_015680 | Cyclin Pas1/PHO80 domain containing 1 (CNPPD1) | 412 |
| NM_030796 | Vesicular, overexpressed in cancer, prosurvival protein 1 (VOPP1) | 413 |
| NM_024069 | KxDL motif containing 1 (KXD1) | 414 |
| NM_013234 | Eukaryotic translation initiation factor 3, subunit K (EIF3K) | 415 |
| NM_013310 | Chromosome 2 open reading frame 27A (C2orf27A) | 416 |
| NM_018507 | Hypothetical protein PRO1843 (PRO1843) | 417 |
| NM_017670 | OTU domain, ubiquitin aldehyde binding 1 (OTUB1) | 418 |
| NM_016292 | TNF receptor-associated protein 1 (TRAP1) | 419 |
| NM_014916 | Lemur tyrosine kinase 2 (LMTK2) | 420 |
| NM_014696 | G protein regulated inducer of neurite outgrowth 2 (GPRIN2) | 421 |
| NM_014630 | Zinc finger protein 592 (ZNF592) | 422 |
| NM_014761 | Increased sodium tolerance 1 homolog (yeast) (IST1) | 423 |
| NM_007286 | Synaptopodin (SYNPO) | 424 |
| NM_007263 | Coatomer protein complex, subunit epsilon (COPE) | 425 |
| NM_006349 | Zinc finger, HIT-type containing 1 (ZNHIT1) | 426 |
| NM_006004 | Ubiquinol-cytochrome c reductase hinge protein (UQCRH) | 427 |
| NM_005787 | Asparagine-linked glycosylation 3, alpha-1,3-mannosyltransferase homolog (S. cerevisiae) (ALG3) | 428 |
| NM_012412 | H2A histone family, member V (H2AFV) | 429 |
| NM_012401 | Plexin B2 (PLXNB2) | 430 |
| NM_007262 | Parkinson protein 7 (PARK7) | 431 |
| NM_007273 | Prohibitin 2 (PHB2) | 432 |
| NM_021009 | Ubiquitin C (UBC) | 433 |
| NM_023009 | MARCKS-like 1 (MARCKSL1) | 434 |
| NM_015456 | Cofactor of BRCA1 (COBRA1) | 435 |
| NM_005053 | RAD23 homolog A (S. cerevisiae) (RAD23A) | 436 |
| NM_006830 | Ubiquinol-cytochrome c reductase, complex III subunit XI (UQCR11), | 437 |
| NM_005682 | G protein-coupled receptor 56 (GPR56) | 438 |
| NM_012102 | Arginine-glutamic acid dipeptide (RE) repeats (RERE) | 439 |
| NM_005550 | Kinesin family member C3 (KIFC3) | 440 |
| NM_021960 | Myeloid cell leukemia sequence 1 (BCL2-related) (MCL1) | 441 |
| NM_021959 | Protein phosphatase 1, regulatory (inhibitor) subunit 11 (PPP1R11) | 442 |
| NM_014730 | Malectin (MLEC) | 443 |
| NM_014402 | Ubiquinol-cytochrome c reductase, complex III subunit VII, 9.5 kDa (UQCRQ) | 444 |
| NM_007067 | K(lysine) acetyltransferase 7 (KAT7) | 445 |
| NM_006086 | Tubulin, beta 3 class III (TUBB3) | 446 |
| NM_014972 | Transcription factor 25 (basic helix-loop-helix) (TCF25) | 447 |
| NM_024092 | Transmembrane protein 109 (TMEM109) | 448 |
| NM_021983 | Major histocompatibility complex, class II, DR beta 4 (HLA-DRB4) | 449 |
| NM_006510 | Tripartite motif containing 27 (TRIM27) | 450 |
| NM_006711 | RNA binding protein S1, serine-rich domain (RNPS1) | 451 |
| NM_006145 | DnaJ (Hsp40) homolog, subfamily B, member 1 (DNAJB1) | 452 |
| NM_033142 | Chorionic gonadotropin, beta polypeptide 7 (CGB7) | 453 |
| NM_006351 | Translocase of inner mitochondrial membrane 44 homolog (yeast) (TIMM44) | 454 |
| NM_014281 | Poly-U binding splicing factor 60 KDa (PUF60) | 455 |
| NM_012106 | ADP-ribosylation factor-like 2 binding protein (ARL2BP) | 456 |
| NM_021975 | V-rel reticuloendotheliosis viral oncogene homolog A (avian) (RELA), | 457 |
| NM_014874 | Mitofusin 2 (MFN2) | 458 |
| NM_006796 | AFG3 ATPase family gene 3-like 2 (S. cerevisiae)(AFG3L2) | 459 |
| NM_006666 | RuvB-like 2 (E. coli) (RUVBL2) | 460 |
| NM_005219 | Diaphanous homolog 1 (Drosophila) (DIAPH1) | 461 |
| NM_033546 | Myosin, light chain 12B, regulatory (MYL12B) | 462 |
| NM_032348 | Matrix-remodelling associated 8 (MXRA8) | 463 |
| NM_024798 | Sorting nexin 22 (SNX22) | 464 |
| NM_021103 | Thymosin beta 10 (TMSB10) | 465 |
| NM_020195 | Short chain dehydrogenase/reductase family 39U, member 1 (SDR39U1) | 466 |
| NM_017432 | Prostate tumor overexpressed 1 (PTOV1) | 467 |
| NM_014901 | Ring finger protein 44 (RNF44) | 468 |
| NM_014694 | ADAMTS-like 2 (ADAMTSL2) | 469 |
| NM_007369 | G protein-coupled receptor 161 (GPR161) | 470 |
| NM_006156 | Neural precursor cell expressed, developmentally down-regulated 8 (NEDD8) | 471 |
| NM_006429 | chaperonin containing TCP1, subunit 7 (eta) (CCT7) | 472 |
| NM_006513 | Seryl-tRNA synthetase (SARS) | 473 |
| NM_005022 | Profilin 1 (PFN1) | 474 |
| NM_014654 | Syndecan 3 (SDC3) | 475 |
| NM_007209 | Ribosomal protein L35 (RPL35) | 476 |
| NM_006082 | Tubulin, alpha 1b (TUBA1B) | 477 |
| NM_006362 | Nuclear RNA export factor 1 (NXF1) | 478 |
| NM_014228 | Solute carrier family 6 (neurotransmitter transporter, L-proline), member 7 (SLC6A7) | 479 |
| NM_006411 | 1-acylglycerol-3-phosphate O-acyltransferase 1(AGPAT1) | 480 |
| NM_021134 | Mitochondrial ribosomal protein L23 (MRPL23) | 481 |
| NM_021974 | Polymerase (RNA) II (DNA directed) polypeptide F (POLR2F) | 482 |
| NM_006808 | Sec61 beta subunit (SEC61B) | 483 |
| NM_005617 | Ribosomal protein S14 (RPS14) | 484 |
| NM_005520 | Heterogeneous nuclear ribonucleoprotein H1 (H) (HNRNPH1) | 485 |
| NM_006755 | Transaldolase 1 (TALDO1) | 486 |
| NM_006010 | Mesencephalic astrocyte-derived neurotrophic factor (MANF) | 487 |
| NM_005088 | A kinase (PRKA) anchor protein 17A (AKAP17A) | 488 |
| NM_014754 | Phosphatidylserine synthase 1 (PTDSS1) | 489 |
| NM_021953 | Forkhead box M1 (FOXM1), | 490 |
| NM_006908 | RAS-related C3 botulinum toxin substrate 1 (rho family, small GTP binding protein Rac1) (RAC1) | 491 |
| NM_014231 | Vesicle-associated membrane protein 1 (synaptobrevin 1) (VAMP1) | 492 |
| NM_014833 | KIAA0618 gene product (KIAA0618) | 493 |
| NM_005157 | c-abl oncogene 1, non-receptor tyrosine kinase (ABL1) | 494 |
| NM_006325 | RAN, member RAS oncogene family (RAN) | 495 |
| NM_007245 | Ataxin 2-like (ATXN2L) | 496 |
| NM_007008 | Reticulon 4 (RTN4) | 497 |
| NM_006782 | Zinc finger protein-like 1 (ZFPL1) | 498 |
| NM_006694 | Jumping translocation breakpoint (JTB) | 499 |
| NM_006703 | Nudix (nucleoside diphosphate linked moiety X)-type motif 3 (NUDT3), | 500 |
| NM_006032 | Copine VI (neuronal) (CPNE6) | 501 |
| NM_012227 | GTP binding protein 6 (putative) (GTPBP6) | 502 |
| NM_014604 | Tax1 (human T-cell leukemia virus type I) binding protein 3 (TAX1BP3), | 503 |
| NM_021642 | Fc fragment of IgG, low affinity IIa, receptor (CD32) (FCGR2A) | 504 |
| NM_005354 | Jun D proto-oncogene (JUND), | 505 |
| NM_020529 | Nuclear factor of kappa light polypeptide gene enhancer in B-cells inhibitor, alpha (NFKBIA) | 506 |
| NM_005561 | Lysosomal-associated membrane protein 1 (LAMP1) | 507 |
| NM_014774 | KIAA0494 | 508 |
| NM_014390 | Staphylococcal nuclease and tudor domain containing 1 (SND1) | 509 |
| NM_014623 | Male-enhanced antigen 1 (MEA1) | 510 |
| NM_014453 | Charged multivesicular body protein 2A (CHMP2A) | 511 |
| NM_012127 | CDKN1A interacting zinc finger protein 1 (CIZ1) | 512 |
| NM_012099 | CD3e molecule, epsilon associated protein (CD3EAP) | 513 |
| NM_006888 | Calmodulin 1 (phosphorylase kinase, delta) (CALM1) | 514 |
| NM_006867 | RNA binding protein with multiple splicing (RBPMS) | 515 |
| NM_006743 | Complement component 1, q subcomponent-like 1 (C1QL1) | 516 |
| NM_006688 | Tubulin, gamma complex associated protein 2 (TUBGCP2) | 517 |
| NM_006295 | Valyl-tRNA synthetase (VARS) | 518 |
| NM_006283 | Transforming, acidic coiled-coil containing protein 1 (TACC1) | 519 |
| NM_006221 | Peptidylprolyl cis/trans isomerase, NIMA-interacting 1 (PIN1) | 520 |
| NM_006148 | LIM and SH3 protein 1 (LASP1) | 521 |
| NM_005954 | Metallothionein 3 (MT3) | 522 |
| NM_006003 | Ubiquinol-cytochrome c reductase, Rieske iron-sulfur polypeptide 1 (UQCRFS1) | 523 |
| NM_005998 | Chaperonin containing TCP1, subunit 3 (gamma) (CCT3) | 524 |
| NM_005997 | Vacuolar protein sorting 72 homolog (S. cerevisiae) (VPS72) | 525 |
| NM_005629 | Solute carrier family 6 (neurotransmitter transporter, creatine) | 526 |
| NM_005548 | Lysyl-tRNA synthetase (KARS) | 527 |
| NM_005545 | Immunoglobulin superfamily containing leucine-rich repeat (ISLR) | 528 |
| NM_005507 | Cofilin 1 (non-muscle) (CFL1) | 529 |
| NM_005381 | Nucleolin (NCL) | 530 |
| NM_005439 | Myeloid leukemia factor 2 (MLF2) | 541 |
| NM_006445 | PRP8 pre-mRNA processing factor 8 homolog (S. cerevisiae) (PRPF8) | 542 |
| NM_019059 | translocase of outer mitochondrial membrane 7 homolog (yeast) (TOMM7) | 543 |
| NM_006039 | Mannose receptor, C type 2 (MRC2) | 544 |
| NM_006066 | Aldo-keto reductase family 1, member A1 (aldehyde reductase) (AKR1A1) | 545 |
| NM_013318 | Proline-rich coiled-coil 2B (PRRC2B) | 546 |
| NM_006098 | Guanine nucleotide binding protein (G protein), beta polypeptide 2-like 1 (GNB2L1), | 547 |
| NM_007359 | Cancer susceptibility candidate 3 (CASC3) | 548 |
| NM_017510 | Transmembrane emp24 protein transport domain containing 9 (TMED9), | 549 |
| NM_015399 | Breast cancer metastasis suppressor 1 (BRMS1) | 550 |
| NM_014508 | Apolipoprotein B mRNA editing enzyme, catalytic polypeptide-like 3C (APOBEC3C) | 551 |
| NM_018955 | Ubiquitin B (UBB) | 552 |
| NM_006368 | cAMP responsive element binding protein 3 (CREB3) | 553 |
| NM_015024 | Exportin 7 (XPO7) | 554 |
| NM_031420 | Mitochondrial ribosomal protein L9 (MRPL9) | 555 |
| NM_013232 | Programmed cell death 6 (PDCD6) | 556 |
| NM_005917 | Malate dehydrogenase 1, NAD (soluble) (MDH1) | 557 |
| NM_032801 | Junctional adhesion molecule 3 (JAM3) | 558 |
| NM_030662 | Mitogen-activated protein kinase kinase 2 (MAP2K2) | 559 |
| NM_006268 | D4, zinc and double PHD fingers family 2 (DPF2) | 560 |
| NM_006826 | Tyrosine 3-monooxygenase/tryptophan 5-monooxygenase activation protein (YWHAQ) | 561 |
| NM_144582 | Testis expressed 261 (TEX261) | 562 |
| NM_144565 | Dual oxidase maturation factor 1 (DUOXA1) | 563 |
| NM_005984 | Solute carrier family 25 (mitochondrial carrier; citrate transporter), member 1 (SLC25A1) | 564 |
| NM_017828 | COMM domain containing 4 (COMMD4) | 565 |
| NM_020150 | SAR1 homolog A (S. cerevisiae) (SAR1A) | 566 |
| NM_014610 | Glucosidase, alpha; neutral AB (GANAB) | 567 |
| NM_014225 | Protein phosphatase 2, regulatory subunit A, alpha (PPP2R1A) | 568 |
| NM_006937 | SMT3 suppressor of mif two 3 homolog 2 (S. cerevisiae) (SUMO2) | 569 |
| NM_005726 | Ts translation elongation factor, mitochondrial (TSFM) | 570 |
| NM_005347 | Heat shock 70 kDa protein 5 (glucose-regulated protein, 78 kDa) (HSPA5) | 571 |
| NM_014255 | Canopy 2 homolog (zebrafish) (CNPY2) | 572 |
| NM_006815 | KDEL (Lys-Asp-Glu-Leu) endoplasmic reticulum protein retention receptor 1 (KDELR1) | 573 |
| NM_005456 | Mitogen-activated protein kinase 8 interacting protein | 574 |
| NM_005273 | Guanine nucleotide binding protein (G protein), beta polypeptide 2 (GNB2) | 575 |
| NM_007260 | Lysophospholipase II (LYPLA2) | 576 |
| NM_007103 | NADH dehydrogenase (ubiquinone) flavoprotein 1, 51 kDa (NDUFV1) | 577 |
| NM_017797 | BTB (POZ) domain containing 2 (BTBD2) | 578 |
| NM_016237 | Anaphase promoting complex subunit 5 (ANAPC5) | 579 |
| NM_005801 | Eukaryotic translation initiation factor 1 (EIF1) | 580 |
| NM_005216 | Dolichyl-diphosphooligosaccharide-protein glycosyltransferase (DDOST) | 581 |
| NM_016457 | Protein kinase D2 (PRKD2) | 582 |
| NM_006442 | DR1-associated protein 1 (negative cofactor 2 alpha) (DRAP1) | 583 |
| NM_021019 | Myosin, light chain 6, alkali, smooth muscle and non-muscle (MYL6) | 584 |
| NM_005112 | WD repeat domain 1 (WDR1) | 585 |
| NM_005370 | RAB8A, member RAS oncogene family (RAB8A) | 586 |
| NM_006289 | Talin 1 (TLN1) | 587 |
| NM_005698 | Secretory carrier membrane protein 3 (SCAMP3) | 588 |
| NM_024011 | Cyclin-dependent kinase 11A (CDK11A) | 589 |
| NM_005105 | RNA binding motif protein 8A (RBM8A) | 590 |
| NM_006013 | Ribosomal protein L10 (RPL10) | 591 |
| NM_005786 | Teashirt zinc finger homeobox 1 (TSHZ1) | 592 |
| NM_007104 | Ribosomal protein L10a (RPL10A) | 593 |
| NM_005762 | Tripartite motif containing 28 (TRIM28) | 594 |
| NM_012138 | Apoptosis antagonizing transcription factor (AATF) | 595 |
| NM_015318 | Rho/Rac guanine nucleotide exchange factor (GEF) 18 (ARHGEF18) | 596 |
| NM_012423 | Ribosomal protein L13a (RPL13A) | 597 |
| NM_021128 | Polymerase (RNA) II (DNA directed) polypeptide L, 7.6 kDa (POLR2L) | 598 |
| NM_032635 | Transmembrane protein 147 (TMEM147) | 599 |
| NM_005080 | X-box binding protein 1 (XBP1) | 600 |
| NM_006389 | Hypoxia up-regulated 1 (HYOU1) | 601 |
| NM_024112 | Chromosome 9 open reading frame 16 (C9orf16) | 602 |
| NM_006817 | Transmembrane emp24 domain trafficking protein 2 (TMED2) | 603 |
| NM_022830 | Terminal uridylyl transferase 1, U6 snRNA-specific (TUT1) | 604 |
| NM_019884 | Glycogen synthase kinase 3 alpha (GSK3A) | 605 |
| NM_021107 | Mitochondrial ribosomal protein S12 (MRPS12) | 606 |
| NM_021074 | NADH dehydrogenase (ubiquinone) flavoprotein 2, 24 kDa (NDUFV2) | 607 |
| NM_014944 | Calsyntenin 1 (CLSTN1) | 608 |
| NM_014764 | DAZ associated protein 2 (DAZAP2) | 609 |
| NM_015343 | CTD nuclear envelope phosphatase 1 (CTDNEP1) | 610 |
| NM_014420 | Dickkopf homolog 4 (Xenopus laevis) (DKK4) | 611 |
| NM_005884 | p21 protein (Cdc42/Rac)-activated kinase 4 (PAK4) | 612 |
| NM_012407 | Protein interacting with PRKCA 1 (PICK1) | 613 |
| NM_012111 | AHA1, activator of heat shock 90 kDa protein ATPase homolog 1 (yeast) (AHSA1) | 614 |
| NM_007144 | Polycomb group ring finger 2 (PCGF2) | 615 |
| NM_007108 | Transcription elongation factor B (SIII), polypeptide 2 (18 kDa, elongin B) (TCEB2) | 616 |
| NM_007278 | GABA(A) receptor-associated protein (GABARAP) | 617 |
| NM_007100 | ATP synthase, H+ transporting, mitochondrial Fo complex, subunit E (ATP5I) | 618 |
| NM_006936 | SMT3 suppressor of mif two 3 homolog 3 (S. cerevisiae) (SUMO3) | 619 |
| NM_006899 | Isocitrate dehydrogenase 3 (NAD+) beta (IDH3B), nuclear gene encoding mitochondrial protein | 620 |
| NM_006801 | RNA binding motif (RNP1, RRM) protein 3 (RBM3) | 621 |
| NM_006612 | Kinesin family member 1C (KIF1C) | 622 |
| NM_006659 | Tubulin, gamma complex associated protein 2 (TUBGCP2) | 623 |
| NM_006595 | Apoptosis inhibitor 5 (API5) | 624 |
| NM_006401 | Acidic (leucine-rich) nuclear phosphoprotein 32 family, member B (ANP32B), | 625 |
| NM_006423 | Rab acceptor 1 (prenylated) (RABAC1) | 626 |
| NM_006460 | Hexamethylene bis-acetamide inducible 1 (HEXIM1) | 627 |
| NM_006356 | ATP synthase, H+ transporting, mitochondrial Fo complex, subunit d (ATP5H) | 628 |
| NM_005891 | Acetyl-CoA acetyltransferase 2 (ACAT2) | 629 |
| NM_005839 | Serine/arginine repetitive matrix 1 (SRRM1) | 630 |
| NM_005594 | Nascent polypeptide-associated complex alpha subunit (NACA) | 631 |
| NM_005340 | Histidine triad nucleotide binding protein 1 (HINT1) | 632 |
| NM_005175 | ATP synthase, H+ transporting, mitochondrial Fo complex, subunit C1 (subunit 9) (ATP5G1) | 633 |
| NM_005165 | Aldolase C, fructose-bisphosphate (ALDOC) | 634 |
| NM_005001 | NADH dehydrogenase (ubiquinone) 1 alpha subcomplex, 7, 14.5 kDa (NDUFA7) | 635 |

[0227] Routes of Administration

[0228] The following discussion on routes of administration is merely provided to illustrate exemplary embodiments and should not be construed as limiting the scope in any way.

[0229] Formulations suitable for oral administration can consist of (a) liquid solutions, such as an effective amount of the analog of the present disclosure dissolved in diluents, such as water, saline, or orange juice; (b) capsules, sachets, tablets, lozenges, and troches, each containing a predetermined amount of the active ingredient, as solids or granules; (c) powders; (d) suspensions in an appropriate liquid; and (e) suitable emulsions. Liquid formulations may include diluents, such as water and alcohols, for example, ethanol, benzyl alcohol, and the polyethylene alcohols, either with or without the addition of a pharmaceutically acceptable surfactant. Capsule forms can be of the ordinary hard- or soft-shelled gelatin type containing, for example, surfactants, lubricants, and inert fillers, such as lactose, sucrose, calcium phosphate, and corn starch. Tablet forms can include one or more of lactose, sucrose, mannitol, corn starch, potato starch, alginic acid, microcrystalline cellulose, acacia, gelatin, guar gum, colloidal silicon dioxide, croscarmellose sodium, talc, magnesium stearate, calcium stearate, zinc stearate, stearic acid, and other excipients, colorants, diluents, buffering agents, disintegrating agents, moistening agents, preservatives, flavoring agents, and other pharmacologically compatible excipients. Lozenge forms can comprise the analog of the present disclosure in a flavor, usually sucrose and acacia or tragacanth, as well as pastilles comprising the analog of the present disclosure in an inert base, such as gelatin and glycerin, or sucrose and acacia, emulsions, gels, and the like containing, in addition to, such excipients as are known in the art.

[0230] The analogs of the disclosure, alone or in combination with other suitable components, can be delivered via pulmonary administration and can be made into aerosol formulations to be administered via inhalation. These aerosol formulations can be placed into pressurized acceptable propellants, such as dichlorodifluoromethane, propane, nitrogen, and the like. They also may be formulated as pharmaceuticals for non-pressured preparations, such as in a nebulizer or an atomizer. Such spray formulations also may be used to spray mucosa. In some embodiments, the analog is formulated into a powder blend or into microparticles or nanoparticles. Suitable pulmonary formulations are known in the art. See, e.g., Qian et al., Int J Pharm 366: 218-220 (2009); Adjei and Garren, Pharmaceutical Research, 7(6): 565-569 (1990); Kawashima et al., J Controlled Release 62(1-2): 279-287 (1999); Liu et al., Pharm Res 10(2): 228-232 (1993); International Patent Application Publication Nos. WO 2007/133747 and WO 2007/141411.

[0231] Formulations suitable for parenteral administration include aqueous and non-aqueous, isotonic sterile injection solutions, which can contain anti-oxidants, buffers, bacteriostats, and solutes that render the formulation isotonic with the blood of the intended recipient, and aqueous and non-aqueous sterile suspensions that can include suspending agents, solubilizers, thickening agents, stabilizers, and preservatives. The term, “parenteral” means not through the alimentary canal but by some other route such as subcutaneous, intramuscular, intraspinal, or intravenous. The analog of the present disclosure can be administered with a physiologically acceptable diluent in a pharmaceutical carrier, such as a sterile liquid or mixture of liquids, including water, saline, aqueous dextrose and related sugar solutions, an alcohol, such as ethanol or hexadecyl alcohol, a glycol, such as propylene glycol or polyethylene glycol, dimethylsulfoxide, glycerol, ketals such as 2,2-dimethyl-1,3-dioxolane-4-methanol, ethers, poly(ethyleneglycol) 400, oils, fatty acids, fatty acid esters or glycerides, or acetylated fatty acid glycerides with or without the addition of a pharmaceutically acceptable surfactant, such as a soap or a detergent, suspending agent, such as pectin, carbomers, methylcellulose, hydroxypropylmethylcellulose, or carboxymethylcellulose, or emulsifying agents and other pharmaceutical adjuvants.

[0232] Oils, which can be used in parenteral formulations include petroleum, animal, vegetable, or synthetic oils. Specific examples of oils include peanut, soybean, sesame, cottonseed, corn, olive, petrolatum, and mineral. Suitable fatty acids for use in parenteral formulations include oleic acid, stearic acid, and isostearic acid. Ethyl oleate and isopropyl myristate are examples of suitable fatty acid esters.

[0233] Suitable soaps for use in parenteral formulations include fatty alkali metal, ammonium, and triethanolamine salts, and suitable detergents include (a) cationic detergents such as, for example, dimethyl dialkyl ammonium halides, and alkyl pyridinium halides, (b) anionic detergents such as, for example, alkyl, aryl, and olefin sulfonates, alkyl, olefin, ether, and monoglyceride sulfates, and sulfosuccinates, (c) nonionic detergents such as, for example, fatty amine oxides, fatty acid alkanolamides, and polyoxyethylenepolypropylene copolymers, (d) amphoteric detergents such as, for example, alkyl-β-aminopropionates, and 2-alkyl-imidazoline quaternary ammonium salts, and (e) mixtures thereof.

[0234] The parenteral formulations will typically contain from about 0.5% to about 25% by weight of the analog of the present disclosure in solution. Preservatives and buffers may be used. In order to minimize or eliminate irritation at the site of injection, such compositions may contain one or more nonionic surfactants having a hydrophile-lipophile balance (HLB) of from about 12 to about 17. The quantity of surfactant in such formulations will typically range from about 5% to about 15% by weight. Suitable surfactants include polyethylene glycol sorbitan fatty acid esters, such as sorbitan monooleate and the high molecular weight adducts of ethylene oxide with a hydrophobic base, formed by the condensation of propylene oxide with propylene glycol. The parenteral formulations can be presented in unit-dose or multi-dose sealed containers, such as ampoules and vials, and can be stored in a freeze-dried (lyophilized) condition requiring only the addition of the sterile liquid excipient, for example, water, for injections, immediately prior to use. Extemporaneous injection solutions and suspensions can be prepared from sterile powders, granules, and tablets of the kind previously described.

[0235] Injectable formulations are in accordance with the invention. The requirements for effective pharmaceutical carriers for injectable compositions are well-known to those of ordinary skill in the art (see, e.g., Pharmaceutics and Pharmacy Practice, J. B. Lippincott Company, Philadelphia, Pa., Banker and Chalmers, eds., pages 238-250 (1982), and ASHP Handbook on Injectable Drugs, Toissel, 4th ed., pages 622-630 (1986)).

[0236] Additionally, the analog of the present disclosures can be made into suppositories for rectal administration by mixing with a variety of bases, such as emulsifying bases or water-soluble bases. Formulations suitable for vaginal administration can be presented as pessaries, tampons, creams, gels, pastes, foams, or spray formulas containing, in addition to the active ingredient, such carriers as are known in the art to be appropriate.

[0237] It will be appreciated by one of skill in the art that, in addition to the above-described pharmaceutical compositions, the analog of the disclosure can be formulated as inclusion complexes, such as cyclodextrin inclusion complexes, or liposomes.

[0238] Treatment and Prevention

[0239] The terms “treat,” and “prevent” as well as words stemming therefrom, as used herein, do not necessarily imply 100% or complete treatment or prevention. Rather, there are varying degrees of treatment or prevention of which one of ordinary skill in the art recognizes as having a potential benefit or therapeutic effect. In this respect, the inventive methods can provide any amount of any level of treatment or prevention in a mammal. Furthermore, the treatment or prevention can include treatment or prevention of one or more conditions or symptoms of the disease being treated or prevented. Also, for purposes herein, “prevention” can encompass delaying the onset of the disease, or a symptom or condition thereof.

[0240] Systems, Computer-Readable Storage Media, and Methods Implemented by a Computer Processor

[0241] FIG. 34 illustrates an exemplary embodiment 101 of a system 100 for assessing a subject's need for an implanted cardiac defibrillator (ICD). Generally, the system 100 may include one or more client devices 102, a network 104, and a database 108. Each client device 102 may be communicatively coupled to the network 104 by one or more wired or wireless network connections 112, which may be, for example, a connection complying with a standard such as one of the IEEE 802.11 standards (“Wi-Fi”), the Ethernet standard, or any other appropriate network connection. Similarly, the database 108 may be communicatively coupled to the network 104 via one or more connections 114. (Of course, the database could alternatively be internal to one or more of the client devices 102.) The database 108 may store data related to the determination of a subject's need for an ICD including, but not limited to, data of a biological sample obtained from the subject, data of a biological sample obtained from a control or test population, data of a Gaussian distribution associated with the data of the biological samples, data of one or more threshold values associated with the data of the biological sample(s) and/or Gaussian distribution, etc. The data of the biological samples may be, for example, related to one or more of a level of a truncated SCN5A Exon 28 transcript, a level of a full length SCN5A Exon 28 transcript, a level of multiple SCN5A Exon 28 transcripts, etc., as described in greater detail below.

[0242] As will be understood, the network 104 may be a local area network (LAN) or a wide-area network (WAN). That is, network 104 may include only local (e.g., intra-organization) connections or, alternatively, the network 104 may include connections extending beyond the organization and onto one or more public networks (e.g., the Internet). In some embodiments, for example, the client device 102 and the database 108 may be within the network operated by a single company (Company A). In other embodiments, for example, the client device(s) 102 may be on a network operated by Company A, while the database 108 may be on a network operated by a second company (Company B), and the networks of Company A and Company B may be coupled by a third network such as, for example, the Internet.

[0243] Referring still to FIG. 34, the client device 102 includes a processor 128 (CPU), a RAM 130, and a non-volatile memory 132. The non-volatile memory 132 may be any appropriate memory device including, by way of example and not limitation, a magnetic disk (e.g., a hard disk drive), a solid state drive (e.g., a flash memory), etc. Additionally, it will be understood that, at least with regard to FIG. 34, the database 108 need not be separate from the client device 102. Instead, in some embodiments, the database 108 is part of the non-volatile memory 132 and the data 122, 124, 126 may be stored as data within the memory 132. For example, the data 122 may be included as data in a spreadsheet file stored in the memory 132, instead of as data in the database 108. In addition to storing the records of the database 108 (in some embodiments), the memory 132 stores program data and other data necessary to analyze data of one or more sample and/or control populations, determine a Gaussian fit for the data, determine a threshold against which data of the subject may be compared, and/or determine a subject's need for an ICD. For example, in an embodiment, the memory 132 stores a first routine 134, a second routine 136, and a third routine 138. The first routine 134 may receive data values related to one or more sample and/or control populations, and may fit the data values received by the routine 134 to a Gaussian distribution. The second routine 136 may computer one or more statistical parameters of the data collected by the first routine 134, such as determining a mean value, a standard deviation value, etc. of the Gaussian distribution. Additionally and/or alternatively, the second routine 136 may set a first threshold against which data from one or more subjects may be compared in order to determine whether each subject should receive an ICD. The third routine 138 may, for example, receive data for one or more subjects, compare the data of the one or more subjects to the threshold value(s) determined by the second routine 136, and/or determine whether each subject should receive an ICD according to the comparison of the subject's data to the threshold value. Regardless, each of the routines is executable by the processor 128 and comprises a series of compiled or compilable machine-readable instructions stored in the memory 132. Additionally, the memory 132 may store generated reports or records of data output by one of the routines 134 or 136. Alternatively, the reports or records may be output to the database 108. One or more display/output devices 140 (e.g., printer, display, etc.) and one or more input devices 142 (e.g., mouse, keyboard, tablet, touch-sensitive interface, etc.) may also be coupled to the client device 102, as is generally known.

[0244] As will be understood, although individual operations of one or more methods are illustrated and described as separate operations, one or more of the individual operations may be performed concurrently, and nothing requires that the operations be performed in the order illustrated. Structures and functionality presented as separate components in example configurations may be implemented as a combined structure or component. Similarly, structures and functionality presented as a single component may be implemented as separate components. These and other variations, modifications, additions, and improvements fall within the scope of the subject matter herein.

[0245] For example, the network 104 may include but is not limited to any combination of a LAN, a MAN, a WAN, a mobile, a wired or wireless network, a private network, or a virtual private network. Moreover, while only two clients 102 are illustrated in FIG. 34 to simplify and clarify the description, it is understood that any number of client computers are supported and can be in communication with one or more servers (not shown).

[0246] Additionally, certain embodiments are described herein as including logic or a number of routines. Routines may constitute either software routines (e.g., code embodied on a machine-readable medium or in a transmission signal) or hardware routines. A hardware routine is tangible unit capable of performing certain operations and may be configured or arranged in a certain manner. In example embodiments, one or more computer systems (e.g., a standalone, client or server computer system) or one or more hardware routines of a computer system (e.g., a processor or a group of processors) may be configured by software (e.g., an application or application portion) as a hardware routine that operates to perform certain operations as described herein.

[0247] Similarly, the methods or routines described herein may be at least partially processor-implemented. For example, at least some of the operations of a method may be performed by one or processors or processor-implemented hardware modules. The performance of certain of the operations may be distributed among the one or more processors, not only residing within a single machine, but deployed across a number of machines. In some example embodiments, the processor or processors may be located in a single location (e.g., within a home environment, an office environment or as a server farm), while in other embodiments the processors may be distributed across a number of locations.

[0248] The performance of certain of the operations may be distributed among the one or more processors, not only residing within a single machine, but deployed across a number of machines. In some example embodiments, the one or more processors or processor-implemented modules may be located in a single geographic location (e.g., within a home environment, an office environment, or a server farm). In other example embodiments, the one or more processors or processor-implemented modules may be distributed across a number of geographic locations.

[0249] Some embodiments may be described using the expression “coupled” and “connected” along with their derivatives. For example, some embodiments may be described using the term “coupled” to indicate that two or more elements are in direct physical or electrical contact. The term “coupled,” however, may also mean that two or more elements are not in direct contact with each other, but yet still co-operate or interact with each other. The embodiments are not limited in this context.

[0250] As used herein, the terms “comprises,” “comprising,” “includes,” “including,” “has,” “having” or any other variation thereof, are intended to cover a non-exclusive inclusion. For example, a process, method, article, or apparatus that comprises a list of elements is not necessarily limited to only those elements but may include other elements not expressly listed or inherent to such process, method, article, or apparatus. Further, unless expressly stated to the contrary, “or” refers to an inclusive or and not to an exclusive or. For example, a condition A or B is satisfied by any one of the following: A is true (or present) and B is false (or not present), A is false (or not present) and B is true (or present), and both A and B are true (or present).

[0251] In addition, use of the “a” or “an” are employed to describe elements and components of the embodiments herein. This is done merely for convenience and to give a general sense of the description. This description should be read to include one or at least one and the singular also includes the plural unless it is obvious that it is meant otherwise.

[0252] Still further, the figures depict preferred embodiments of a map editor system for purposes of illustration only. One skilled in the art will readily recognize from the following discussion that alternative embodiments of the structures and methods illustrated herein may be employed without departing from the principles described herein

[0253] Upon reading this disclosure, those of skill in the art will appreciate still additional alternative structural and functional designs for a system and a process for identifying terminal road segments through the disclosed principles herein. Thus, while particular embodiments and applications have been illustrated and described, it is to be understood that the disclosed embodiments are not limited to the precise construction and components disclosed herein. Various modifications, changes and variations, which will be apparent to those skilled in the art, may be made in the arrangement, operation and details of the method and apparatus disclosed herein without departing from the spirit and scope defined in the appended claims.

[0254] The invention provides systems comprising: a processor; a memory device coupled to the processor, and machine readable instructions stored on the memory device. In exemplary embodiments, the machine readable instructions that, when executed by the processor, cause the processor to
[0255] (i) receive a plurality of data values, each data value is a ratio determined from a biological sample obtained from a subject of a first population, wherein the ratio compares a level of a truncated SCN5A Exon 28 transcript of a biological sample obtained from a subject to (A) a level of a full length SCN5A Exon 28 transcript of the biological sample or (B) a level of all SCN5A Exon 28 transcripts of the biological sample or (C) a level of a full length SCN5A Exon 28 transcript and a level or one or more truncated SCN5A Exon 28 transcripts of the biological sample, wherein each subject of the first population is a subject known as having an ICD that has given a shock;
[0256] (ii) fit the plurality of data values to a first Gaussian distribution;
[0257] (iii) determine a mean value, μ, and a standard deviation, σ, of the first Gaussian distribution;
[0258] (iv) set a first threshold ratio, R_{T}, at μ−Xσ, wherein X is a number between 0.7 and 4.0.

[0259] In exemplary aspects, R_{T}=μ−Xσ, and X is a number between 0.7 and 1.0, a number between 2.0 and 4.0, or a number between 2.326 and 4.0. In exemplary aspects, the system comprises machine readable instructions that, when executed by the processor, cause the processor to receive as input an R_{S} and compare R_{S} to R_{T}. In exemplary aspects, the machine readable instructions that, when executed by the processor, cause the processor to provide an output indicating the relationship between R_{S} and R_{T}.

[0260] In alternative or additional aspects, the system of the invention comprises machine readable instructions that, when executed by the processor, cause the processor to:
[0261] (i) receive a second plurality of data values, each data value of the second plurality is a ratio determined from a biological sample obtained from a subject of a second population, wherein the ratio compares a level of a truncated SCN5A Exon 28 transcript of a biological sample obtained from a subject to (A) a level of a full length SCN5A Exon 28 transcript of the biological sample or (B) a level of all SCN5A Exon 28 transcripts of the biological sample or (C) a level of a full length SCN5A Exon 28 transcript and a level or one or more truncated SCN5A Exon 28 transcripts of the biological sample, wherein each subject of the second population is a subject known as having an ICD that has not given a shock;
[0262] (ii) fit the second plurality of data values to a second Gaussian distribution;
[0263] (iii) determine a mean value, μ, and a standard deviation, σ, of the second Gaussian distribution;
[0264] (iv) set a second threshold ratio, R_{T2}, at μ+Xσ, wherein X is a number between 0.7 and 4.0.

[0265] In exemplary aspects, R_{T2}=μ+Xσ, and X is a number between 0.7 and 1.0, or a number between 2.0 and 4.0, or a number between 2.326 and 4.0.

[0266] In alternative or additional aspects, the system of the invention comprises machine readable instructions that, when executed by the processor, cause the processor to:
[0267] (i) receive a third plurality of data values, each data value of the third plurality is a ratio determined from a biological sample obtained from a subject of a second population, wherein the ratio compares a level of a truncated SCN5A Exon 28 transcript of a biological sample obtained from a subject to (A) a level of a full length SCN5A Exon 28 transcript of the biological sample or (B) a level of all SCN5A Exon 28 transcripts of the biological sample or (C) a level of a full length SCN5A Exon 28 transcript and a level or one or more truncated SCN5A Exon 28 transcripts of the biological sample, wherein each subject of the third population is a subject known as (I) not having an ICD, (II) not having a cardiac disease, (III) having normal left ventricular function, (IV) not having diastolic dysfunction, or (V) a combination thereof;
[0268] (ii) fit the third plurality of data values to a third Gaussian distribution;
[0269] (iii) determine a mean value, μ, and a standard deviation, σ, of the third Gaussian distribution;
[0270] (iv) set a third threshold ratio, R_{T3}, at μ+4.0σ.

[0271] With respect to any of these systems, in some aspects, the system comprises machine readable instructions that, when executed by the processor, cause the processor to set a combined threshold ratio, R_{Tcombined}, at a point where the area under the curve of the first Gaussian distribution is maximized and the area under the curve of the second Gaussian distribution is minimized.

[0272] Also provided herein are computer-readable storage media having stored thereon machine-readable instructions executable by a processor. In exemplary embodiments, the instructions comprise:
[0273] (i) instructions for causing the processor to receive a plurality of data values, each data value is a ratio determined from a biological sample obtained from a subject of a first population, wherein the ratio compares a level of a truncated SCN5A Exon 28 transcript of a biological sample obtained from a subject to (A) a level of a full length SCN5A Exon 28 transcript of the biological sample or (B) a level of all SCN5A Exon 28 transcripts of the biological sample or (C) a level of a full length SCN5A Exon 28 transcript and a level or one or more truncated SCN5A Exon 28 transcripts of the biological sample, wherein each subject of the first population is a subject known as having an ICD that has given a shock;
[0274] (ii) instructions for causing the processor to fit the plurality of data values to a first Gaussian distribution;
[0275] (ii) instructions for causing the processor to determine a mean value, μ, and a standard deviation, σ, of the first Gaussian distribution;

[0276] (iii) instructions for causing the processor to set a first threshold ratio, R_{T}, at μ−Xσ, wherein X is a number between 0.7 and 4.0.

[0277] In exemplary aspects, R_{T}=μ−Xσ, and X is a number between 0.7 and 1.0, or between 2.0 and 4.0 or between 2.326 and 4.0. In exemplary aspects, the computer-readable storage medium comprises instructions for causing the processor to receive as input an Rₛ and compare Rₛ to R_{T}. In exemplary aspects, the computer-readable storage medium comprises instructions for causing the processor to provide an output indicating the relationship between Rₛ and R_{T}.

[0278] In alternative or additional embodiments, the computer-readable storage medium of the invention comprises instructions for causing the processor to:
[0279] (i) receive a second plurality of data values, each data value of the second plurality is a ratio determined from a biological sample obtained from a subject of a second population, wherein the ratio compares a level of a truncated SCN5A Exon 28 transcript of a biological sample obtained from a subject to (A) a level of a full length SCN5A Exon 28 transcript of the biological sample or (B) a level of all SCN5A Exon 28 transcripts of the biological sample or (C) a level of a full length SCN5A Exon 28 transcript and a level or one or more truncated SCN5A Exon 28 transcripts of the biological sample, wherein each subject of the second population is a subject known as having an ICD that has not given a shock;
[0280] (ii) fit the second plurality of data values to a second Gaussian distribution;
[0281] (iii) determine a mean value, μ, and a standard deviation, σ, of the second Gaussian distribution;
[0282] (iv) set a second threshold ratio, R_{T2}, at μ+Xσ, wherein X is a number between 0.7 and 4.0.

[0283] In exemplary aspects, R_{T}=μ−Xσ, and X is a number between 0.7 and 1.0, or between 2.0 and 4.0 or between 2.326 and 4.0.

[0284] In alternative or additional embodiments, the computer-readable storage medium comprises instructions for causing the processor to:
[0285] (i) receive a third plurality of data values, each data value of the third plurality is a ratio determined from a biological sample obtained from a subject of a second population, wherein the ratio compares a level of a truncated SCN5A Exon 28 transcript of a biological sample obtained from a subject to (A) a level of a full length SCN5A Exon 28 transcript of the biological sample or (B) a level of all SCN5A Exon 28 transcripts of the biological sample or (C) a level of a full length SCN5A Exon 28 transcript and a level or one or more truncated SCN5A Exon 28 transcripts of the biological sample, wherein each subject of the third population is a subject known as (I) not having an ICD, (II) not having a cardiac disease, (III) having normal left ventricular function, (IV) not having diastolic dysfunction, or (V) a combination thereof;
[0286] (ii) fit the third plurality of data values to a third Gaussian distribution;
[0287] (iii) determine a mean value, μ, and a standard deviation, σ, of the third Gaussian distribution;
[0288] (iv) set a third threshold ratio, R_{T3}, at μ+4.0σ.

[0289] The computer-readable storage medium in exemplary aspects comprises instructions for causing the processor to set a combined threshold ratio, R_{Tcombined}, at a point where the area under the curve of the first Gaussian distribution is maximized and the area under the curve of the second Gaussian distribution is minimized.

[0290] Further provided herein are methods implemented by a processor in a computer. In exemplary embodiments, the method comprises the steps of:
[0291] (i) receiving a plurality of data values, each data value is a ratio determined from a biological sample obtained from a subject of a first population, wherein the ratio compares a level of a truncated SCN5A Exon 28 transcript of a biological sample obtained from a subject to (A) a level of a full length SCN5A Exon 28 transcript of the biological sample or (B) a level of all SCN5A Exon 28 transcripts of the biological sample or (C) a level of a full length SCN5A Exon 28 transcript and a level or one or more truncated SCN5A Exon 28 transcripts of the biological sample, wherein each subject of the first population is a subject known as having an ICD that has given a shock;
[0292] (ii) fitting the plurality of data values to a first Gaussian distribution;
[0293] (ii) determining a mean value, μ, and a standard deviation, σ, of the first Gaussian distribution;
[0294] (iii) setting a first threshold ratio, R_{T}, at μ−Xσ, wherein X is a number between 0.7 and 4.0.

[0295] In exemplary aspects, R_{T}=μ−Xσ, and X is a number between 0.7 and 1.0, or between 2.0 and 4.0 or between 2.326 and 4.0. In exemplary aspects, the method comprises the step of receiving as input an Rₛ and compare Rₛ to R_{T}. In exemplary aspects, the method comprises the step of providing an output indicating the relationship between Rₛ and R_{T}.

[0296] In alternative or exemplary embodiments, the method comprises the steps of:
[0297] (i) receiving a second plurality of data values, each data value of the second plurality is a ratio determined from a biological sample obtained from a subject of a second population, wherein the ratio compares a level of a truncated SCN5A Exon 28 transcript of a biological sample obtained from a subject to (A) a level of a full length SCN5A Exon 28 transcript of the biological sample or (B) a level of all SCN5A Exon 28 transcripts of the biological sample or (C) a level of a full length SCN5A Exon 28 transcript and a level or one or more truncated SCN5A Exon 28 transcripts of the biological sample, wherein each subject of the second population is a subject known as having an ICD that has not given a shock;
[0298] (ii) fitting the second plurality of data values to a second Gaussian distribution;
[0299] (iii) determining a mean value, μ, and a standard deviation, σ, of the second Gaussian distribution;
[0300] (iv) setting a second threshold ratio, R_{T2}, at μ+Xσ, wherein X is a number between 0.7 and 4.0.

[0301] In exemplary aspects, R_{T}=μ−Xσ, and X is a number between 0.7 and 1.0, or between 2.0 and 4.0 or between 2.326 and 4.0.

[0302] In alternative or exemplary aspects, the method comprises the steps of:
[0303] (i) receiving a third plurality of data values, each data value of the third plurality is a ratio determined from a biological sample obtained from a subject of a second population, wherein the ratio compares a level of a truncated SCN5A Exon 28 transcript of a biological sample obtained from a subject to (A) a level of a full length SCN5A Exon 28 transcript of the biological sample or (B) a level of all SCN5A Exon 28 transcripts of the biological sample or (C) a level of a full length SCN5A Exon 28 transcript and a level or one or more truncated SCN5A Exon 28 transcripts of the biological sample, wherein each subject of the third population is a subject known as (I) not having an ICD, (II) not having a cardiac disease, (III) having normal left ventricular function, (IV) not having diastolic dysfunction, or (V) a combination thereof;
[0304] (ii) fitting the third plurality of data values to a third Gaussian distribution;
[0305] (iii) determining a mean value, μ, and a standard deviation, σ, of the third Gaussian distribution;
[0306] (iv) setting a third threshold ratio, R_{T3}, at μ+4.0σ.

[0307] In exemplary aspects, the method comprises the step of setting a combined threshold ratio, R_{Tcombined}, at a point where the area under the curve of the first Gaussian distribution is maximized and the area under the curve of the second Gaussian distribution is minimized.

[0308] In alternative embodiments of the systems, media, and methods described in this section, the invention further provides systems, media, and methods, wherein each subject of the first population is a subject known as having heart failure or arrhythmia. In exemplary aspects, the system, media, or method, further comprises instructions relating to receiving a third plurality of data values, each data value of the third plurality is a ratio determined from a biological sample obtained from a subject of a third population, wherein each subject of the third population is a subject known as (I) not having an ICD, (II) not having a cardiac disease, e.g., heart failure or arrhythmia, (III) having normal left ventricular function, (IV) not having diastolic dysfunction, or (V) a combination thereof.

[0309] Kits

[0310] Provided herein are kits, e.g., diagnostic kits, that may be used to diagnose or determine risk, in accordance with the methods set forth herein. In exemplary embodiments, the kit comprises: (a) an E28C binding agent and/or an E28D binding agent, (b) a WT SCN5A binding agent and/or an E28A-S binding agent and instructions for use. In exemplary aspects, the kit further comprises a binding agent to all SCN5A Exon 28 transcripts: WT, E28A-S, E28B, E28C, and E28D.

[0311] In additional or alternative embodiments, the kit comprises a computer-readable storage medium having stored thereon (I) a plurality of data values, each data value is a ratio determined from a biological sample obtained from a subject of a first population, wherein the ratio compares a level of a truncated SCN5A Exon 28 transcript to (i) a level of a full length SCN5A Exon 28 transcript of the biological sample or (ii) a level of all SCN5A Exon 28 transcripts of the biological sample or (iii) a level of a full length SCN5A Exon 28 transcript and a level or one or more truncated SCN5A Exon 28 transcripts of the biological sample, wherein each subject of the first population is a subject known as having an ICD that has given a shock; (II) a Gaussian distribution of the plurality of data values; (IV) the mean value and the standard deviation of the Gaussian distribution, or (V) a threshold ratio, R_{T}, which is based on the mean value and the standard deviation of the Gaussian distribution of the plurality of data values. In exemplary embodiments, the kit comprises access to the computer-readable storage medium. In exemplary embodiments, the kit comprises access to any one or more of (I) to (V).

[0312] In additional or alternative embodiments, the kit comprises a computer-readable storage medium having stored thereon (I) a plurality of data values, each data value is a ratio determined from a biological sample obtained from a subject of a first population, wherein the ratio compares a level of a truncated SCN5A Exon 28 transcript to (i) a level of a full length SCN5A Exon 28 transcript of the biological sample or (ii) a level of all SCN5A Exon 28 transcripts of the biological sample or (iii) a level of a full length SCN5A Exon 28 transcript and a level or one or more truncated SCN5A Exon 28 transcripts of the biological sample, wherein each subject of the first population is a subject known as having an ICD that has not given a shock; (II) a Gaussian distribution of the plurality of data values; (IV) the mean value and the standard deviation of the Gaussian distribution, or (V) a threshold ratio, R_{T}, which is based on the mean value and the standard deviation of the Gaussian distribution of the plurality of data values. In exemplary embodiments, the kit comprises access to the computer-readable storage medium. In exemplary embodiments, the kit comprises access to any one or more of (I) to (V).

[0313] In additional or alternative embodiments, the kit comprises a computer-readable storage medium having stored thereon (I) a plurality of data values, each data value is a ratio determined from a biological sample obtained from a subject of a first population, wherein the ratio compares a level of a truncated SCN5A Exon 28 transcript to (i) a level of a full length SCN5A Exon 28 transcript of the biological sample or (ii) a level of all SCN5A Exon 28 transcripts of the biological sample or (iii) a level of a full length SCN5A Exon 28 transcript and a level or one or more truncated SCN5A Exon 28 transcripts of the biological sample, wherein each subject of the first population is a subject known as (I) not having an ICD, (II) not having a cardiac disease, (III) having normal left ventricular function, (IV) not having diastolic dysfunction, or (V) a combination thereof; (II) a Gaussian distribution of the plurality of data values; (IV) the mean value and the standard deviation of the Gaussian distribution, or (V) a threshold ratio, R_{T}, which is based on the mean value and the standard deviation of the Gaussian distribution of the plurality of data values. In exemplary embodiments, the kit comprises access to any one or more of (I) to (V).

[0314] In additional or alternative embodiments, the kit comprises a computer-readable storage medium having stored thereon (I) a plurality of data values, each data value is a ratio determined from a biological sample obtained from a subject of a first population, wherein the ratio compares a level of a truncated SCN5A Exon 28 transcript to (i) a level of a full length SCN5A Exon 28 transcript of the biological sample or (ii) a level of all SCN5A Exon 28 transcripts of the biological sample or (iii) a level of a full length SCN5A Exon 28 transcript and a level or one or more truncated SCN5A Exon 28 transcripts of the biological sample, wherein each subject of the first population is a subject known as having heart failure, or a risk therefor; (II) a Gaussian distribution of the plurality of data values; (IV) the mean value and the standard deviation of the Gaussian distribution, or (V) a threshold ratio, R_{T}, which is based on the mean value and the standard deviation of the Gaussian distribution of the plurality of data values. In exemplary embodiments, the kit comprises access to the computer-readable storage medium. In exemplary embodiments, the kit comprises access to any one or more of (I) to (V).

[0315] In additional or alternative embodiments, the kit comprises a computer-readable storage medium having stored thereon (I) a plurality of data values, each data value is a ratio determined from a biological sample obtained from a subject of a first population, wherein the ratio compares a level of a truncated SCN5A Exon 28 transcript to (i) a level of a full length SCN5A Exon 28 transcript of the biological sample or (ii) a level of all SCN5A Exon 28 transcripts of the biological sample or (iii) a level of a full length SCN5A Exon 28 transcript and a level or one or more truncated SCN5A Exon 28 transcripts of the biological sample, wherein each subject of the first population is a subject known as having arrhythmia, or a risk therefor; (II) a Gaussian distribution of the plurality of data values; (IV) the mean value and the standard deviation of the Gaussian distribution, or (V) a threshold ratio, R_{T}, which is based on the mean value and the standard deviation of the Gaussian distribution of the plurality of data values. In exemplary embodiments, the kit comprises access to the computer-readable storage medium. In exemplary embodiments, the kit comprises access to any one or more of (I) to (V).

[0316] In exemplary embodiments, the kit comprises a hLuc7a binding agent, a RBM25 binding agent, a PERK binding agent, and/or a chaperone protein binding agent, e.g., a CHOP binding agent, a calnexin binding agent.

[0317] As used herein, the term “binding agent” refers to any compound which specifically binds to the marker of interest (hLuc7A, RBM25, PERK, CHOP, calnexin, and the like).

[0318] With regard to the foregoing, the binding agent in some aspects is an antibody, antigen binding fragment, an aptamer, a protein or peptide substrate, or a nucleic acid probe. Such binding agents are known in the art. In some aspects, the kit comprises a collection of binding agents, e.g., a collection of antibodies, a collection of nucleic acid probes, each binding agent of which specifically binds to genes or nucleic acids encoding the marker. In some aspects, the collection of nucleic acid probes is formatted in an array on a solid support, e.g., a gene chip. In some aspects, the kit comprises a collection of antibodies which specifically bind to a marker. In some aspects, the kit comprises a multi-well microtiter plate, wherein each well comprises an antibody having a specificity which is unique to the antibodies of the other wells. In some aspects, the kit comprises a collection of substrates which specifically react with a marker. In some aspects, the kit comprises a multi-well microtiter plate, wherein each well comprises a substrate having a specificity which is unique to the substrates of the other wells.

[0319] In some aspects, the kits further comprises instructions for use. In some aspects, the instructions are provided as a paper copy of instructions, an electronic copy of instructions, e.g., a compact disc, a flash drive, or other electronic medium. In some aspects, the instructions are provided by way of providing directions to an internet site at which the instructions may be accessed by the user.

[0320] In some aspects, the kits further comprise a unit for a collecting a biological sample, e.g., any of the samples described herein, of the subject. In some aspects, the unit for collecting a sample is a vial, a beaker, a tube, a microtiter plate, a petri dish, and the like.

[0321] The following examples serve only to illustrate the invention or provide background information relating to the invention. The following examples are not intended to limit the scope of the invention in any way.

### EXAMPLES

### Example 1

[0322] This example demonstrates the detection of human SCN5A N-terminal and C-terminal mRNA splicing variants, as shown in U.S. Patent Application Publication No. 2007/0212723.

[0323] The first human SCN5A cDNA (reported by Sheng et al. (DNA and Cell Biology 13: 9-23 (1994), see, also, Zhang et al., Gene Expression 8: 85-103 (1999)) (accession # M77235) was 8.5-9.0 kb, with a 5′ end extending to 150 bp upstream of the ATG codon and a 2293 bp 3′ UTR, which contains neither polyadenylylation signal sequence nor a poly A region. The mouse scn5a gene has complex 5′ and 3′ UTR and 5′ and 3′ UTR splice variants are developmentally regulated (Shang, L. L. & Dudley, S. C., Jr, J. Biol. Chem. 280: 933-940 (2005)). Therefore, we sought to evaluate whether the previously reported human UTR sequences represented the full extent of the cDNA isoforms. The RACE procedure was employed to the 5′ and 3′ mRNA ends upstream of the start codon and downstream of the stop codon, respectively. PCR amplification of cDNA yielded several distinct bands on gel electrophoresis. Subsequent nested PCR amplification gave three bands (380 bp, 200 bp and 100 bp) in both fetal heart RNA and adult heart RNA (FIG. 5). Sequences of these bands showed that the all three bands were SCN5A gene specific. A comparison between the 5′RACE-PCR products and genomic sequences showed that there were two different exon 1 isoforms from reported data, one was 160 bp and located 16.0 kb upstream of exon 2, which is known. A novel isoform was 85 bp, which was separated by 12.3 kb from exon 2. Another new splicing exon 1 was found in exon 2, which means the there is no exon 1 splice. The RNA directly transcripted from exon 2, but the TSS was short 13 bp in comparison with the normal exon 2. From the RACE procedure, we were unable to obtain the exon 1 isoform reported previously (Shang, L. J. & Dudley, S. C., Biophysical Journal 86, 424A (2004)), suggesting that a total of three exon 1 splice variants existed. And the multiple TSS existed in all splicing isoforms. We named these untranslated cDNA fragments, exon 1 A (160 bp), exon 1B (85 bp), and exon 2B (313 bp), respectively. Exon 1A, identified by primer extension and RNase protection, has been reported previously in human and rat with a length ranging from 97-176 bp (Yang et al., Cardiovascular Research 61:, 56-65 (2004)). All isoforms of the SCN5A 5′UTR were summarized in FIGS. 1 and 3 and sequences were depicted in FIGS. 2 and 4.

[0324] Analysis of the 3′UTR showed evidence of splice variations in fetal and adult heart. By RACE-PCR using GSP3′ and Oligo dT primers, we identified six alternative 3′UTRs (FIG. 6). Comparison of genomic and cDNA sequences showed that the 3′ UTRs had six different poly A splicing variants. One was long, 2295 bp after the stop codon, and was not found in Genebank, but it is consistent with the published mouse scn5a cDNA (accession # AJ271477). Additionally, there was a second, short variant of 824 bp, which corresponded to the human scn5a cDNA 5′UTR (accession # M77235). These two isoforms have the exon 28 bp the same splice referred to as E28A. Three Exon 28 splice variants were detected in the 3′UTR: E28B (27 bp), E28C (39 bp), and E28D (114 bp). The sequences of E28B, E28C, and E28D are set forth as Genbank accession numbers EF092292, EF092293 and EF092294, respectively, and here as SEQ ID NOs: 636-638, respectively). E28B is fetal specific, E28D is adult specific, whereas the E28C expressed in both fetal and human heart. In comparison with the full-length E28A variant, all three variants were shorter and result in prematurely truncated Na+ channel proteins missing the segments from domain IV, S3 or S4 to the C-terminus (George et al., Cytogenet Cell Genet. 68: 67-70 (1995)). A summary of the findings of the 3′UTR is presented in FIG. 3. The sequences of the all isoforms for the SCN5A 3′UTR were preformatted in FIG. 4.

[0325] The methods used in this example are as follows:

[0326] Human heart tissue from fetal and adult was homogenized, and total RNA isolated using the RNeasy Mini kit following the manufacturer's instructions (Qiagen, Valencia, Calif.). RNA ligase-mediated-rapid amplification cDNA ends (RLM-RACE) methods were used to characterize the 5′ and 3′ ends of the human SCN5A mRNA using GeneRacer kit (Invitrogen, Carlsbad, Calif.). Briefly, 1 .mu.g total RNA was treated with calf intestinal phosphatase to remove the 5′ phosphates of the truncated mRNA and non-mRNA forms of total RNA. Tobacco acid pyrophosphatase was used to remove the 5′ cap structure from intact, full-length mRNA, and T4 RNA ligase was use to add the GeneRacer RNA Oligo to the 5′ end of the mRNA. The first-strand cDNA was synthesized by SuperScript II reverse transcriptase using a reverse gene specific primer GSP5′ (5′CATCTTCCGGTTCAGTGCCACCA 3′ (SEQ ID NO: 640)) complementary to exon 3 of human SCN5A gene and the GeneRacer Oligo dT primer at the 5′ and 3′ ends, respectively. The 5′ and 3′ ends PCR reactions were performed with Platinum Pfx DNA polymerase using 10 .mu.M of GSP5′ and the GeneRacer 5′ primer for amplifying the 5′ end fragment and using 10 .mu.M of the forward GSP3′ (5′GCTGCCCTGCGCCACTACTACTTC3′ (SEQ ID NO: 641)) complementary to exon 27 of the human SCN5A and the GeneRacer Oligo dT primer to obtain 3′ end. An additional PCR reaction with nested primers was performed. The nested PCR products were cloned into pCRII-TOPO vector (Invitrogen, Carlsbad, Calif.) and sequenced to confirm the RACE-PCR products were from the human SCN5A cDNA.

[0327] Primary DNA sequence analysis was performed with Vector NTI 7 software (Informax, Frederick, Md.). The sequences were aligned to human genomic DNA and cDNA sequences in Genebank database to identify transcription start sites (TSSs) and 3′ polyadenylylation sites.

### Example 2

[0328] This example demonstrates data suggesting that human heart failure is associated with abnormal C-terminal splicing variants in the cardiac sodium channel, as shown in one or more of Shang et al., Circulation Research 101: 1146-1154 (2007) and U.S. Patent Application Publication No. 2007/0212723.

Detection of Three Novel Human SCN5A C-Terminal mRNA Splicing Variants

[0329] Two SCN5A mRNA variants that do not alter the coding sequence have been reported previously from mouse heart that differed in the length of the poly-A tail (Gellens et al., 1992, Proc. Natl. Acad. Sci. U.S.A. 89:554-558; and Shang, L. L., and Dudley, S. C., Jr., 2005, J. Biol. Chem. 280:933-940). Using RACE-PCR, we found analogous sodium channel mRNA isoforms in the human heart (FIG. 6). In addition to these bands, nested R_{T}-PCR revealed shorter bands in both fetal and adult human heart. Sequence analysis of the bands revealed three new mRNA splice variants, as described above and designated as exons E28B (27 bp), E28C (39 bp), and E28D (114 bp) (Genbank accession numbers EF092292, EF092293 and EF092294, respectively). The alternative splicing that produced these novel exons are summarized in FIG. 3. In comparison with the full-length E28A isoform, all three new isoforms were shorter and were predicted to result in prematurely truncated sodium channel proteins missing the segments from domain IV, S3 or S4 to the C-terminus.

### The Relative Abundances of the SCN5A Isoforms are Developmentally Regulated

[0330] Splice variants of Naᵥ1.5 in C-terminus are known to vary during development. Therefore, we investigated whether our novel 3′ isoforms showed similar behavior. Quantitative real time R_{T}-PCR indicated that the relative abundances of each of the isoforms increased by 41.6% (p<0.001), 5.1 fold (p<0.01), 1.1 fold (p<0.01) and 4.8 fold (p<0.001) for E28A, E27B, E28C, and E28D from fetal to adult heart, respectively (FIG. 9A). FIG. 9B shows that as a percentage of the total transcripts, E28A was the most abundant in both fetal and adult heart. E28B was the least abundant in fetal heart but increased the most with development, changing 1.7.+−.0.2 fold. As a percentage of the total mRNA, the alternative splice variants E28B and E28D increased significantly, the full length E28A decreased, and the E28C abundance was unchanged during development.

### Heart Failure Increased Two of the Sodium Channel C-Terminal Splice Variants

[0331] The presence of splice variants was compared between the ventricles obtained from 12 patients whose hearts were removed during cardiac transplantation for HF (Table 1), and three control patients with no known cardiac disease.

| Patients # | Type of CM | Gender | Age |
|---|---|---|---|
| 1 | DCM | M | 60 |
| 2 | DCM | M | 54 |
| 3 | DCM | M | 62 |
| 4 | ICM | M | 43 |
| 5 | DCM | M | 45 |
| 6 | DCM | M | 51 |
| 7 | DCM | F | 59 |
| 8 | DCM | M | 63 |
| 9 | DCM | M | 60 |
| 10 | DCM | M | 45 |
| 11 | DCM | M | 63 |
| 12 | ICM | M | 47 |

DCM: dilated cardiomyopathy
ICM: ischemic cardiomyopathy
CM: cardiomyopathy
M: male
F: female

[0332] Real time R_{T}-PCR results indicated that the relative mRNA abundance of E28A full length isoform was decreased by 24.7% in HF patients compared to controls (p<0.001). Two of the truncated isoforms were increased in HF patients as compared to the controls (FIG. 10A), however. The E28C and E28D mRNA abundances were increased 14.2 fold (p<0.001) and 3.8 fold (p<0.001) respectively comparing controls to HF patients (FIG. 10A). On the other hand, the least abundant isoform, E28B, decreased 73.8% (p<0.01) in HF patients. As a percentage of the total transcript abundance, E28A and B decreased significantly from 87.5% (.+−.5.1) and 2.4% (.+−.0.4) in controls to 45.1% (.+−.4.5) and 0.5% (.+−.0.2) in HF patients. The E28C and D variants increased from 3.9% (.+−.0.6) and 6.2% (.+−.4.6) in controls to 34.3% (.+−.3.1) and 20.2% (.+−.3.3) in HF patients (FIG. 10A). The total percentage of short isoform variants went from 12.5% (.+−.5.1) of the total SCN5A mRNA in control subjects to 54.9% (.+−.4.5) in HF patients.

[0333] Because inhomogeneities of channel expression are thought to contribute to arrhythmic risk, the relative RNA abundance of the SCN5A isoforms were compared in the left (LV, FIG. 10B) and right ventricles (RV, FIG. 10C) of controls and HF patients. Normalized to the total SCN5A mRNA, E28A abundances were decreased in both the LV and RV. The pattern of changes for the truncation variants was similar in both ventricles with increases in E28C and E28D. The percentage of truncated mRNAs was increased more in the LV when compared to the RV (p=0.0003).

### Truncated Isoforms Reduce Sodium Channel Function

[0334] The three novel SCN5A splice variations identified were predicted to result in prematurely truncated, nonfunctional Sodium channels. We tested this idea by making a gene-targeted mouse model with a nonsense mutation in exon 28 (1652stop, FIG. 7). Proper homologous recombination in embryonic stems cells was confirmed by sequencing, restriction site analysis, and Southern blotting (see supplemental material). Embryonic stem (ES) cells were successfully injected into blastocyst and produced chimeric animals. Nevertheless, this mutation was lethal to embryos when attempting to breed these animals. Undifferentiated mouse ES cells heterozygous for the SCN5A^{1652stop} had normal growth characteristics and could be differentiated into spontaneously beating cardiomyocytes (CMs), however.

[0335] To assess the electrophysiological effect of the presence of the truncation, ES cells heterozygous for the mutation were differentiated in vitro to CMs and studied electrophysiologically. Current and action potentials (APs) were compared from single CMs enzymatically isolated at day 19. The Sodium channel current-voltage relationships from contracting CMs isolated from wild-type and truncation embryonic bodies derived from the respective ES cell lines are shown in FIG. 5A. The peak I_{Na} was decreased by 86.1% (.+−.5.2, n=8, p=0.0002) in differentiated CMs containing the truncation when compared to that of WT (76.4.+−.9.5 pA/pF to 10.6.+−.0.9 pA/pF; FIG. 5B). Action potentials recorded in the current clamp mode from spontaneously beating CMs showed significant slowing of the beating frequency from 2.9.+−.0.4 beats per second (bps) in the wild-type to 1.3 bps.+−.0.1 (p=0.02, n=11) in the truncation mutant. Action potentials also showed a significant reduction in the maximum rate of rise of the AP in the truncation mutation from 4.1.+−.0.3 mV/ms to 1.4.+−.0.1 mV/ms (p<0.01, n=11) and a reduced amplitude from 76.+−.1.4 mV to 52.+−.0.6 mV (p.ltoreq.0.01, n=11) in comparison with wild-type (WT) (FIGS. 12C and D). These changes are consistent with reduced sodium channel function.

[0336] Syncytial properties of CMs containing the truncation mutation were studied by dissecting areas of CMs from embryoid bodies and placing them on top of planar multi-electrode arrays (MEAs) (Caspi, and Gepstein. 2004. Potential applications of human embryonic stem cell-derived cardiomyocytes. Ann. N.Y. Acad. Sci. 1015:285-298; and Kehat et al. 2002. High-resolution electrophysiological assessment of human embryonic stem cell-derived cardiomyocytes: a novel in vitro model for the study of conduction. Circ. Res. 91:659-661). Characteristics of bipolar extracellular electrograms from WT and mutated ES cells were compared. The time of the initial decline of the bipolar field potential (FP), the minimum FP amplitude, and conduction velocity are known to reflect sodium channel activity. Consistent with a physiologically significant reduction in sodium current as a result of the truncated mRNA, MEA recordings of CMs with the truncation mutation showed the minimum FP decreased by 70.5% (p<0.05) from −1126.+−.314 .mu.V (n=6) in WT to −332.+−. 174 .mu.V (n=7) in the truncation (FIGS. 13A and B). The FP rise slowed by 45.5% (p<0.05) from 22.+−.4 ms (n=6) to 32.+−.2 ms (n=7) in WT and the mutant (FIGS. 13A and C), respectively. The conduction velocity was decreased by 64.2% (p=0.03) from 5.3.+-.1.2 cm/s (n=6) in WT to 1.9.+−.4 cm/s (n=7) in the truncation (FIG. 13D).

[0337] The methods used in this example are as follows:

### Detection of Human SCN5A 3′UTR Isoforms by RACE-PCR

[0338] Total human RNA from normal fetal and adult whole hearts was purchased from Clontech (Mountain View, Calif.). The RNA ligase-mediated rapid amplification of cDNA ends (RLM-RACE) method was used to characterize the 3′ ends of the human SCN5A mRNA using the GeneRacer kit (Invitrogen, Carlsbad, Calif.). Briefly, 1 μg total RNA was used to synthesize first-strand cDNA by SuperScript II reverse transcriptase using the GeneRacer Oligo dT primer at the 3′ ends. The 3′ ends PCR reactions were performed with Platinum Pfx DNA polymerase using 10 .mu.M of a forward gene-specific primer (GSP) HE26F (5′ CATCCCACGGCCCCTGAACAAGTA 3′ (SEQ ID NO. 642)) complementary to exon 26 of human SCN5A gene and the GeneRacer 3′ primer for amplifying the 3′ end fragment. An additional PCR reaction with a nested GSP primer HE27F (5′ CTGCGCCACTACTACTTCACCAACA 3′ (SEQ ID NO. 643)) corresponding to exon 27 of human SCN5A gene and a nested GeneRacer 3′ primer was performed. The nested PCR products were cloned into pCR4-TOPO vector (Invitrogen, Carlsbad, Calif.) and sequenced. Sequences were compared to that of SCN5A using Vector NTI 7 software (Invitrogen).

### Isolation and Culture of Lymphoblasts

[0339] Human lymphoblast cell lines were developed from peripheral blood mononuclear cells of volunteers with normal cardiac function referred to the cardiac catheterization laboratory at the Atlanta Veterans Administration Medical Center (AVAMC). Procedures and consent forms were approved by the Emory Institutional Review Board and the AVAMC's Research & Development Committee. To initiate immortalized lymphoblast cell lines, peripheral blood was fractionated by Ficoll-Hypaque centrifugation and mononuclear cells were infected with the B95-8 strain of Epstein-Barr virus (EBV). After EBV-transformation, lymphoblasts were cultured in RPMI-1640 medium supplemented with 10% heat-inactivated fetal bovine serum, 2 mM L-glutamine, 100 U/mL penicillin, and 100 mg/mL streptomycin, at 37.degree. C. in a humid atmosphere with 5% CO₂. Medium was changed twice weekly. Cell counts and viability were assessed by trypan blue staining and fluorescence microscopy. Approximately 5.0.times.10⁷ lymphoblasts were collected by centrifugation and the RNA isolated using TRIzol reagent (Invitrogen) as described by manufacturer's manual.

### Real-Time SYBR Green PCR Quantification of SCN5A Transcript Isoforms

[0340] Ventricular tissue from hearts removed at the time of cardiac transplantation at Emory University Hospital under a protocol approved by the Emory Institutional Review Board was homogenized, and total RNA was isolated using the TRIzol reagent (Invitrogen, Carlsbad, Calif.) following the manufacturer's instructions. The total RNA from ventricles and skeletal muscle of the normal adults was bought from Ambion (Austin, Tex.) and Clontech, respectively. To determine the abundance of different cardiac mRNAs carrying variant exon 28 (E28) isoforms, total RNA from left and right ventricles of both normal and patients was used for synthesizing cDNA by reverse transcription using iScript cDNA synthesis Kit (Bio-Rad, Hercules, Calif.) following the manufacturer's instructions. The first strand cDNA was used as template for subsequent PCR. Each PCR reaction contained 12.5 .mu.L of QuantiTect SYBR Green PCR kit master mix (Qiagen, Valencia, Calif.) and 200 nM primer pairs in total 25 .mu.L reaction volume. The reversed primers for exon 28 variants were HSCN5AE28A/R (5′ GGAAGAGCGTCGGGGAGAAGAAGTA 3′ (SEQ ID NO. 21), E28A and 28D), HSCN5AE28B/R (5′ ATGCACATGGAAAGATGTCCTGC 3′ (SEQ ID NO. 644), E28B), HSCN5AE28C/R (5′ TCTTGGCACTTGATGTCTGTCCTTC 3′ (SEQ ID NO.645), E28C) and HSCN5AE28D/R (5′ TCATGAGGGCAAAGAGCAGCGT 3′ (SEQ ID NO. 646), E28A only), respectively. The forward primer, HE27F, was constant in each case. The reactions gave rise to 124 bp, 170 bp, and 143 bp and 211 bp PCR products, respectively. Amplification with primers HE27F and HSCN5AE28D/R produced the full length isoform, E28A. Amplification with HE27F and HSCN5AE28A/R produced a product comprised of both isoforms E28A and E28D. The amount of E28D was calculated by subtraction of the products of these two reactions. All amplifications were performed in triplicate and consisted of 40 cycles of 30 s at 94° C., 30 s at 65° C., and 1 min at 72° C. in a BioRed thermocycler iCycler (Hercules, Calif.). PCR products were analyzed by electrophoresis on 1.5% agarose gels.beta.-actin was used as an internal reference when making quantitative comparison.

### Generation of Truncated Scn5a Mouse Model

[0341] A 4.0-kb fragment of 129 Sv/J mouse genomic DNA was cloned from a mouse ES cell genomic library by PCR amplification using primers RHI28F/R (11) corresponding to the known mouse SCN5A exon 28 sequences (40). One PCR positive clone was used to construct the scn5a truncation targeting vector pBSK.SCN5A^{1652stop} by subcloning a 4.0-kb HindIII genomic fragment. The floxed PGK-neomycin cassette was inserted into AatII site (FIG. 52). An adenosine (A) was deleted in this codon. This deletion resulted in a frame shift turning the 1652 codon that formerly encoded for a methionine into a stop codon (TGA; NCBI ACCESSION NP₋₉₃₂₁₇₃; FIG. 7), predicted to cause premature Sodium channel truncation. The 5′ and 3′ arms of the targeting vector separated by neomycin resistance cassette were 1,767 and 2,214 bp, respectively, leaving a 942 bp homologous fragment on 5′ side of the mutation (FIG. 52). After electroporation with 20 .mu.g of the KpnI-linearized targeting construct into the mouse embryonic stem cells (R1), targeted clones were screened and identified by PCR using primers P1/neoR (P1:5′ GCTGCCCTGCGCCACTATTACTTC 3′ (SEQ ID NO. 647)); neoR: 5′ AAGAACTCGTCAAGAAGGCGATAGAAGGCG 3′ (SEQ ID NO. 648)) neoF/P2 (neorF: 5′ AGGATCTCCTGTCATCTCACCTTGCTCCTG 3′ (SEQ ID NO. 649); P2: 5′ AAGCAAGCTACGTGCCTGGCTG 3′ (SEQ ID NO. 650)) at the 5′ and 3′ ends and neo-cassette (FIGS. 21B and 22A), and using primers P3/P4 (P3: 5′ CAGAGCCCATGTATAGTTGATTTC 3′ (SEQ ID NO. 651); P4: 5′ GCTGTTGGCAAAGGTCTG 3′ (SEQ ID NO. 652)) surrounding the mutation site (FIGS. 21 and 22E). Southern blotting of the 5′ and 3′ ends with the external probes A and B was used to confirm the PCR results (FIGS. 21, 22B, and 22C). The floxed neomycin cassette was excised by expressing transfected Cre recombinase in correctly targeted clones confirmed by PCR using neorF/R (FIG. 21D). Heterozygosity was confirmed by P3-P4 PCR product with or without BspHI digestion (FIG. 21E). Experimental studies were performed on an ES cell line in which one allele of the Sodium channel was successfully targeted.

In Vitro Differentiation of ES Cell into Cardiomyocytes

[0342] R1 mouse ES cells with or without the mutation were maintained in the undifferentiated state using high glucose Dulbecco modified Eagle medium (DMEM, GibcoBRL, Life Technologies Inc., Rockville, Md.) with supplements and differentiated as described previously (Zhang, Y. M., Shang, L., Hartzell, C., Narlow, M., Cribbs, L., and Dudley, S. C., Jr. 2003. Characterization and regulation of T-type Ca²⁺ channels in embryonic stem cell-derived cardiomyocytes. Am. J. Physiol Heart Circ. Physiol 285:H2770-H2779). For patch clamp experiments, areas of beating CMs were mechanically dissected from 19 day old embryoid bodies, and single CMs were obtained by enzymatic digestion of the dissected areas (Shang et al. 2006. Analysis of arrhythmic potential of embryonic stem cell-derived cardiomyocytes. Methods Mol. Biol. 330:221-231). For the MEA experiments, areas of beating CMs were mechanically dissected from 17 day old embryoid bodies, placed on top of a MEA, and cultured for another 2 days prior to recording.

Recording of Sodium Current from ES-Derived Cardiomyocytes

[0343] Patch clamp experiments were performed 1 to 5 days after cell isolation. Cardiomyocytes with uniform contractions and beating rates were used in the study. Patch pipettes were pulled to resistance of 2 to 5 M.OMEGA. Current clamp experiments were conducted in a solution consisting of (in mM) NaCl 140, KCl 5.4, CaCl₂ 1.8, MgCl₂ 1, HEPES 10, and glucose 10 (pH 7.4 by NaOH). The intracellular solution contained (in mM) KCl 120, MgCl₂ 1, MGATP 3, HEPES 10, and EGTA 10 (pH 7.2 by KOH). For voltage clamp experiments, the glass pipettes were filled with a solution of (in mM) CsCl 60, Cesium aspartate 80, EGTA 11, HEPES 10, and Na₂ATP 5 (pH 7.2 with CsOH). The bath solution consisted of (in mM) NaCl 30, N-methyl-D-glucamine (NMDG) Cl 100, CsCl 5, CaCl₂ 2, MgCl₂ 1.2, HEPES 10, and Glucose 5 (pH 7.4 with HCl). Patch clamp data were collected with an Axopatch 200B amplifier and pCLAMP software (Axon Instruments). Data were digitized at 10 kHz and filtered for analysis at 1 kHz. Experiments were performed at 37° C.

### Functional Assessment of a Truncation Mutant by Multi-Electrode Array Recording

[0344] Extracellular recording from WT and truncation syncytial CMs derived from ES cells was performed using a MEA data acquisition system (Multi Channel System, Reutlingen, Germany). The MEA consists of a matrix of 60 titanium nitride coated gold electrodes (30 μm diameter) in an 8×8 layout grid with an inter-electrode distance of 200 μm. The MEA was inserted in the amplifier system. Simultaneous recordings of bipolar extracellular FPs from all electrodes were performed at a sampling frequency of 10 kHz and at 37° C. One electrode at the border of the array was grounded and used as a reference electrode. As described previously by Jiao et al. (2006. A possible mechanism of halocarbon-induced cardiac sensitization arrhythmias. J. Mol. Cell. Cardiol. 41: 698-705), the data were analyzed off-line with a customized toolbox programmed for MATLAB (Mathworks, Natick, Mass.). In order to measure conduction velocity (CV), we calculated the activation time at each point using a threshold-crossing algorithm to form an isochrone map. Three non co-linear points from an area with uniform, parallel isochrones were chosen to calculate CV in two orthogonal directions (e.g. vx and vy). The final CV was calculated as

v=((1/vx)²+(1/vy)²)^{-1/2}.

### Statistical Evaluations

[0345] All data are present as means.+−.S.E.M. Statistical analysis of mean values was carried out using unpaired t tests or one-way ANOVAs with post-hoc correction for multiple comparisons. A p value<0.05 was considered statistically significant.

[0346] Finally, while the control subjects were younger than the HF patients, we could find no evidence of splice variation changes with age (FIG. 20).

[0347] In conclusion, we demonstrate that there are several alternatively truncated forms of SCN5A mRNA in human hearts. During HF, these alternatively spliced mRNA isoforms are likely to reduce sodium current to levels that might contribute to arrhythmic risk alone or in combination with other inciting causes.

### Example 3

[0348] This example provides data demonstrating NFκB dependent transcriptional regulation of the cardiac SCN5A sodium channel by angiotensin II, as shown in one or more of U.S. Patent Application Publication No. 2007/0212723 and Shang et al., Am J Physiol Cell Physiol 294: C372-C379.

### AngII and H₂O₂ Dose Ranging in H9c2 Cells

[0349] To determine appropriate concentrations of these agents in future experiments, rat H9c2 cardiomyocytes were treated with escalating concentrations of AngII and H₂O₂, and the dose-dependent cell viability was determined. H9c2 cardiomyocytes were tolerant of a wide range of AngII concentrations from 1-500 nM in serum free medium (FIG. 14A). On the other hand, higher doses of H₂O₂ induced cell death starting at concentrations of 50 μM (FIG. 14B). Therefore, we restricted further experiments to 20 μM H₂O₂, where there was no statistically significant increase in cell death over the time course of our experiments. Exposures of 48 h were used to allow sufficient time for transcriptional effects on the Na⁺ current.

Scn5a mRNA Abundance was Downregulated by AngII

[0350] H9c2 cells treated with 100 nM AngII for 48 h showed a 47.3% (.+−.5.3%, n=7, P<0.01) reduction in scn5a mRNA abundance (FIG. 15A). Because H9c2 cells are generally responsive only to high doses of AngII (Tran et al. (1995) Biochim. Biophys. Acta 1259, 283-290; and Laufs et al. (2002) Cardiovasc. Res. 53, 911-920), experiments were repeated with acutely isolated rat neonatal cells and a more physiological concentration of AngII. In neonatal cardiomyocytes, a 48 h exposure to 2 nM AngII resulted in a 49.0% (.+−.5.2%, n=10, P<0.01) reduction in scn5a mRNA abundance in neonatal cardiomyocytes, suggesting that isolated myocytes were more sensitive and the effect was not limited to the H9c2 line (FIG. 15B).

Both Cardiac Na⁺ Channel mRNA and Current were Downregulated by H₂O₂

[0351] Because AngII is known to activate the NADPH oxidase generating superoxide that is dismutated to H₂O₂, we tested whether the H₂O₂ would recapitulate the AngII results. Exposure of H9c2 cells to 20 μmol/L H₂O₂ for 48 h caused a similar reduction in Na⁺ channel mRNA (46.9%.+−.3.6%, n=9, p<0.01; FIG. 15A). In isolated neonatal rat myocytes and consistent with their increased sensitivity to AngII, there was an analogous response to a reduced concentration of H₂O₂ for 48 h (40 nM; 45.4%.+−.7.5%, n=9, p<0.01; FIG. 15B). In both types of myocytes, the AngII-mediated downregulation of Na+ channel mRNA could be prevented by pretreatment of the cells with catalase, consistent with the idea that AngII was acting through H₂O₂ production. FIG. 16 shows that 20 won H₂O₂ exposure for 48 h resulted in a 46.0% (.+−.2.9%) decrease in Na⁺ current commensurate with the reduction in mRNA abundance (n=7 for control, n=9 in treated group, P=0.01).

### Evidence of NF-κB Regulation of the Cardiac Na⁺ Channel

[0352] NF-κB is a known redox sensitive transcription factor (Zhou et al. (2001) Free Radic. Biol. Med. 31, 1405-1416). Previously, we have shown that the promoter region of the cardiac Na+ channel contains one NF-κB consensus binding sequence (Shang, L. L. & Dudley, S. C., Jr. (2005) J. Biol. Chem. 280, 933-940). Therefore, we investigated whether NF-κB might be involved in the AngII or H₂O₂-mediated Na⁺ channel transcriptional regulation. To test this idea, we constructed a mutated form of the scn5a promoter in which the NF-κB binding site had been altered, APS3-NF-κBm (FIG. 17A). Promoter-reporter constructs containing the intact NF-κB binding site showed reductions in activity in response to AngII or H₂O₂ (FIG. 17B). The scn5a Na+ channel promoter activity was depressed by 33.0% (.+−.2.6%, n=4, P<0.001) and 42.3% (.+−.4.5%, n=4, P<0.001), respectively, in H9c2 cells when cardiomyocytes transfected with the APS3 construct were compared with and without AngII or H₂O₂ exposures. On the other hand, the construct with a mutated NF-κB binding site showed no significant change in activity in the presence of AngII or H₂O₂.

[0353] To confirm that NF-.kappa.B was binding to the scn5a promoter in response to AngII or H₂O₂ exposure, we employed electrophoretic mobility shift and chromatin immunoprecipitation (ChIP) assays. A 35 bp fragment of the scn5a promoter containing the NF-κB site was used as the probe (FIG. 18A). The NF-κB binding activity increased in the presence of AngII or H₂O₂ treatment. NF-κB B binding was blocked by caffeic acid phenethyl ester, an NF-κB inhibitor (Natarajan et al. (1996) Proc. Natl. Acad. Sci. U.S.A. 93, 9090-9095; Watabe et al. (2004) J. Biol. Chem. 279, 6017-6026). The ChIP assay showed that there was formation of the complete p50-p65 NF-κB heterodimer on the cardiac Na⁺ channel promoter in response to AngII or H₂O₂ treatment (FIG. 18B).

[0354] Overexpression of NF-κB subunits in H9c2 cells confirmed the necessity of the p50 subunit for Na⁺ channel downregulation. Quantitative real-time R_{T}-PCR result showed that the relative scn5a mRNA abundances were decreased in cell lines expressing p50 only or the combination of p50 and p65 by 77.3% (.+−.7.3, n=4) and 88.6% (.+−.4.8, n=4), respectively. There was no significantly change in Na⁺ channel mRNA in the presence of p65 overexpression alone, however (FIG. 19).

[0355] The following methods were used in this example.

### Cell Culture and Cell Viability Assay

[0356] The rat embryonic cardiomyocyte cell line, H9c2 (ATCC cat #CRL-1446), or acutely isolated neonatal rat heart cardiomyocytes were used. Rat neonatal ventricular cells were isolated from 3-day-old Sprague-Dawley rats (Charles River Laboratories Wilmington, Mass.) using a kit and following the manufacturer's instructions (Worthington Biochemical Corp. Lakewood, N.J.). Cells cultured in Dulbecco's modified Eagle's medium (DMEM; ATCC, Manassas, Va.) with 10% fetal calf serum (ATCC) under standard tissue culture conditions at 37° C. to 70-80% confluence were exposed to AngII (Sigma, St. Louis, Mo.) or H₂O₂ (Sigma) in serum free culture medium (SFM) for a total of 48 h in triplicate in 24 well plates. Experiments were repeated three times. After dissociation with 0.125% trypsin-EDTA, 20 μL of 0.4% Trypan-blue (Sigma, St. Louis, Mo.) was added to each well, and a Trypan-blue exclusion viability assay was performed. The use of rats conforms with the Guide for the Care and Use of Laboratory Animals published by the US National Institutes of Health (NIH Publication No. 85-23, revised 1996).

Quantification of scn5a Transcripts by Quantitative Real-Time R_{T}-PCR Assay

[0357] To determine the abundance of cardiac sodium channel (scn5a) mRNA under the various conditions, quantitative real-time R_{T}-PCR was used. Total RNA from untreated and treated cardiomyocytes was isolated using the RNeasy Mini Kit (Qiagen, Valencia, Calif.) with the addition of RNase-free DNase I. Reverse transcription was carried out at 42° C. for 30 min with iScript reverse transcriptase (Bio-Rad, Hercules, Calif.), 1 μg total RNA, and 4 .mu.L of 5.times. iScript reaction mix following the manufacturer's instructions. The first strand cDNA was used as Green Supermix (Bio-Rad) and 2.5 μM primer pairs in total 25 μL reaction volume. The forward primer rtPCRscn5aF (5′ GAAGAAGCTGGGCTCCAAGA 3′ (SEQ ID NO. 653)) recognized a sequence from exon 26. The reverse primer, rtPCRscn5aR (5′ CATCGAAGGCCTGCTTGGTC 3′ (SEQ ID NO. 654)), was complementary to exon 27 of scn5a cDNA. The reactions gave rise to a 101 bp PCR product. All amplifications were performed in triplicate and consisted of 40 cycles of 30 s at 95° C., 30 s at 60° C., and 30 s at 72° C. in a BioRad thermocycler icycler (Hercules, Calif.). PCR products were analyzed by relative standard curve methods β-Actin was used as a reference when making quantitative comparison.

### Electrophysiological Determination of Na+ Current

[0358] Three hours prior to the start of the patch-clamp experiments, H9c2 cells were trypsinized and plated on treated plastic coverslips. H9c2 cells were treated with or without H₂O₂ as indicated. Glass pipettes were pulled on a Sutter Model P-97 horizontal puller to a resistance of 0.5 to 1.5 MΩ. The glass pipettes were filled with a solution of (in mM) CsCl 60, Cesium Aspartate 80, EGTA sodium 11, HEPES 10, Na₂ATP 5 and pH 7.2 with CsOH. The bath solution consisted of (in mM) Na 30, N-methyl-D-glutamate chloride 100, CsCl 5, CaCl₂ 2, MgCl₂ 1.2, HEPES 10, Glucose 5 and pH 7.4 with NaOH. Once a seal was established, a small amount of suction was applied to obtain the whole cell configuration. From a holding potential of −100 mV, peak currents obtained at −10 mV were used for comparison. Cells were tested at 25° C. Data were sampled at 10 kHz and later filtered at 5 kHz for analysis. Currents were recorded and analyzed with an Axopatch 200B amplifier, Axon Digidata 1230A A/D converter and pClamp software (Molecular Devices Corporation, Sunnyvale, Calif.).

### Promoter-Reporter Constructs and Transient Transfection

[0359] The scn5a promoter region has previously been defined (Shang, L. L. & Dudley, S. C., Jr. (2005) J. Biol. Chem. 280, 933-940). For these experiments, a new promoter construct that contained the NF-κB consensus binding site was used to test the effect of treatments on scn5a transcription. This construct, pGL3-APS3, consisted of a 937 bp fragment starting from exon 1C to +32 base pairs relative to the start codon located on exon 2 of mouse scn5a gene.

[0360] H9c2 cardiomyocytes were plated in each well of 24-well plates at a density of 2.5×10⁴ cells in a final volume of 1 mL of culture medium, allowed to attach overnight, and expand to 70%-80% confluence. Transfection of 0.3 μg of the promoter-reporter construct and 0.013 μg of a plasmid containing the herpes simplex virus thymidine kinase (HSV-TK) promoter driving expression of a synthetic Renilla luciferase (phRL-TK; Promega, Madison, Calif.) was carried out with 0.9 μL of Fugene6 chemical transfection reagents (Roche, Indianapolis, Ind.) following the manufacturer's instructions. The serum free DMEM cultural media with or without AngII or H₂O₂ was changed every 24 h. After culture for 48 h, the cells were treated with passive lysis buffer (Promega, Madison, Calif.), and cell extracts were collected for analysis of firefly and Renilla luciferase activities using 100 .mu.L of luciferase assay substrate and 100 .mu.L of Stop & Glo reagent of the dual-luciferase reporter assay system (Promega, Madison, Calif.). Light emission was quantified in a Veritas microplate luminometer using Veritas-version 1.4.0 software (Tuener Biosystems, Sunnyvale, Calif.). Transfection efficiency of the reporter constructs was controlled by comparison to Renilla luciferase activity. The phRL-TK vector minimized any modulation of Renilla luciferase expression by the experimental conditions since it has been engineered to remove the majority of potential transcription factor binding sites. The luciferase activity of the all promoter-constructs was normalized to a pGL3-basic promoter-less control transfected simultaneously. Four separate transfection sessions were analyzed, and at each session, transfections were performed in triplicate. Three dual luciferase readings were taken for each transfection experiment.

### Site-Directed Mutagenesis of NF-κB Binding Site

[0361] Disruption of the NF-.kappa.B binding site was undertaken using the QuikChange II XL sitedirected mutagenesis kit according to the manufacturer's instructions (Stratagene, La Jolla, Calif.). Briefly, for PCR 10 ng of pGL3-APS3 was used as a template, and the nucleotide primers listed were used to mutate the NF-κB binding site (the bold as wild type, the underline as mutant) of pGL3-APS3: NFκB-mutCF: 5′GGTGCTGCACTCAGGCCATCCCTATGAGATCCTC 3′ (SEQ ID NO. 655) and NFκB-mutCR: 5′ GAGGATCTCATAGGGATGGCCTGAGTGCAGCACC 3′ (SEQ ID NO. 656). After digestion with DpnI, 2 μL of PCR product were used to transform XL10-Gold competent cells. Sequencing identified appropriate clones.

### Electrophoretic Mobility Shift Assay (EMSA/Gel-Shift)

[0362] The H9c2 cells were treated for 48 h with AngII or H₂O₂, with or without CAPE (caffeic acid phenethyl ester, an NF-κB inhibitor at 10 μM) starting 24 h after plating. Approximately 5×10⁶ cells were scraped for nuclear protein extraction by nuclear extract kit (Activemotif, Carlsbad, Calif.). A double-stranded oligonucleotide containing the consensus-binding sequence (bold) for NF-κB (5′GGTGCTGCACTCAGGGGATCCCTATGAGATCCTC 3′ (SEQ ID NO. 657)) and NF-κB mutant sequence (5′GGTGCTGCACTCAGGCCATCCCTATGAGATCCTC 3′ (SEQ ID NO. 658)) from scn5a promoter were used as probes to assay for binding activity of the nuclear extracts. Protein-DNA complexes were detected using biotin end-labeled double-stranded DNA probes prepared by annealing complementary oligonucleotides. Oligonucleotides were labeled in a reaction using terminal deoxynucleotide transferase and biotin-N4-CTP (Pierce, Rockford, Ill.) following the biotin 3′ end DNA labeling kit manual. The binding reaction was performed using the LightShift kit (Pierce). Briefly, 30 μg of nuclear extracts and binding buffer were incubated on ice for 5 min in a volume of 20 μL, then the labeled probe (20 fmol) was added, and the reaction was allowed to incubate for an additional 25 min. Following electrophoresis, the DNA-protein complexes were transferred onto nylon membranes and detected using chemiluminescence. TNF-α activated H9c2 cell nuclear extract (5 μg) was used as positive control. The reaction products were separated on a 6% retardation gel. Specificity was confirmed by addition of unlabelled probe in 200-fold excess.

### Chromatin Immunoprecipitation (ChIP) Assay

[0363] Formaldehyde cross-linking and chromatin immunoprecipitation was performed as described in manufactory's manual (ChIP-IT™ kit, Activemotif). Briefly, proteins were crosslinked with chromatin using 1% formaldehyde in H9c2 cells with or without treatment. The cells were subsequently sonicated in lysis buffer, and an aliquot of the lysate was used in a PCR reaction. The remaining lysate was cleared with protein G beads. One half of the cleared lysate was incubated with p50 or p65 antibody, while the other half was used as a negative control without the antibody. After reversing the cross-linking, the immuno-complex was digested with proteinase K, and the DNA was purified. DNA was analyzed by PCR with the PicoMax Polymerase (Stratagene, La Jolla, Calif.) and primers specific to the APS3 promoter region.

### Stable H9c2 Cell Lines Overexpressed NF-κB Subunits p50 and p65

[0364] The H9c2 cells were co-transfected with expression vectors carrying human NF-.kappa.B subunits p50 and/or p65 (Lindholm et al. (2003) J. Hypertens. 21, 1563-1574) and pDsRed-express-N1 vector carrying red fluorescent protein as marker (Clontech, Mountain View, Calif.) and selected with 400 .mu.g/mL geneticin (Invitrogen) for at least for four weeks. At which time, over 90% of the cells showed red fluorescence. Transfection was confirmed by R_{T}-PCR using human p50 or p65 specific primers. The SYBR quantitative real-time R_{T}-PCR was used to assay the Na+ channel expression.

### Statistical Evaluations

[0365] All data are present as means.+−.S.E.M. Statistical analysis of mean values was carried out using Student's paired or unpaired t tests. ANOVA was used for comparison of variance between multiple means. A p value<0.05 was considered statistically significant.

### Example 4

[0366] The following is related to data provided herein.

[0367] Heart Failure Increases Two of the Na+ Channel C-Terminal Splice Variants

[0368] The presence of splice variants was compared between explanted ventricles and control patients with no known cardiac disease. R_{T}-PCR results indicated that the relative mRNA abundance of E28A full-length variant was decreased by 24.7% in HF patients compared to controls (p<0.001). E28C and E28D mRNA abundances were increased 14.2 fold (p<0.001) and 3.8 fold (p<0.001) respectively comparing controls to HF patients. As a percentage of the total SCN5A transcript, E28A and B decreased significantly from 87.5% (±5.1) and 2.4% (±0.4) in controls to 45.1% (±4.5) and 0.5% (±0.2) in HF patients. The E28C and D variants increased from 3.9% (±0.6) and 6.2% (±4.6) in controls to 34.3% (±3.1) and 20.2% (±3.3) in HF patients. The total percentage of short variants went from 12.5% (±5.1) of the total SCN5A mRNA in control subjects to 54.9% (±4.5) in HF patients. Similar amounts of truncated channel variants are known to cause Brugada syndrome (Chen et al., Nature 392: 293-296 (1998); Makiyama et al., J Am Coll Cardiol 46:2100-2106 (2005); Priori et al., Circulation 105: 1342-1347 (2002); Schulze-Bahr et al., Hum Mutat 21: 651-652 (2003); Smits et al., J Am Coll Cardiol 40: 350-356 (2002)). The pattern of changes for the truncation variants was similar in both ventricles with increases in E28C and E28D. Corresponding to the RNA effects, Western analysis of human control and heart failure tissue revealed a 62.8% (±9.7, n=3, p<0.01) protein reduction in HF comparing to normal heart. No bands that might correspond to truncation variants were observed in normal and failing heart.

[0369] Truncation Variants Reduce Na+ Channel Protein and Current.

[0370] Variant cDNA was expressed in the human embryonic kidney (HEK)-SCN5A cell line stably expressing the full-length E28A channel. The expression of E28D reduced the E28A variant mRNA abundance. Using increasing ratios of vector encoding E28D resulted in progressive reductions in full-length transcript mRNA abundance. Neither E28C nor E28D variants generated current when transfected into HEK cells alone, and when transfected into the HEK-SCN5A cell line stably expressing the full-length Na+ channel, both variants reduced Na+ current. The presence of the C or D variants resulted in 54.6% (±8.5, p<0.01, n=14) and 56.0% (±8.9, p<0.01, n=10) reductions in peak current respectively when compared to native alone. The reduction of current was dependent on the ratio of variant to full-length vector used. Fluorescent microscopy of HEK cells transfected with Na+ channel C-terminal labeled variants demonstrated markedly reduced amounts C or D variant Na⁺ channel protein when compared to an equal amount of the full-length E28A variant.

[0371] Physiological Significance of SCN5A Truncation Variants.

[0372] The physiological significance of truncations in SCN5A Exon 28 was tested by making a gene-targeted mouse model with a nonsense mutation in Exon 28 between the truncations caused by the C and D variants. This mutation was lethal to embryos. Undifferentiated mouse embryonic stem cells heterozygous for the SCN5A1652stop had normal growth characteristics and could be differentiated into spontaneously beating cardiomyocytes (CMs). The peak I_{Na} was decreased by 86.1% (±5.2, n=8, p=0.0002) in differentiated CMs containing the truncation when compared to that of WT, again showing a dominant negative effect of the truncation on the wild-type channel. Action potentials recorded in the current clamp mode from spontaneously beating CMs showed significant slowing of the beating frequency (p=0.02, n=11), a significant reduction in the maximum rate of rise of the action potential in the truncation mutation (p<0.01, n=11), and a reduced amplitude (00.01, n=11) in comparison with wild-type. These changes are consistent with reduced Na+ channel function (Smits et al., J Mol Cell Cardiol 38: 969-981 (2005); Tan et al., Nature 409: 1043-1047 (2001); Lei et al., J Physiol 567: 387-400 (2005)). Syncytial properties of these CMs were studied using multielectrode arrays (MEAs) (Caspi et al., Ann NY Acad Sci 1015: 285-298 (2004); Kehat et al., Circ Res 91:659-661 (2002)). Consistent with a physiologically significant reduction in Na+ current as a result of the truncated mRNA, MEA recordings of CMs with the truncation mutation showed conduction velocity was decreased by 64.2% (p<0.03) as compared to the wild-type (Halbach et al., Cell Physiol Biochem 13:271-284 (2003)).

### Example 5

[0373] This example demonstrates that splicing factors hLuc7A and RBM25 are associated with abnormal splicing of SCN5A, as shown in one or both of Gao et al., Circulation, 124(10): 1124-31 (published online on Aug. 22, 2011) and in International Patent Application Publication No. WO/2010/129964.

[0374] The following paragraphs describe the methods used in Examples 5 and 6:

### Cell Culture

[0375] Jurkat T cell clones E6.1 (ATCC, Manassas, Va.) were cultured in RPMI 1640 medium supplemented with 10% heat inactivated fetal calf serum, 4 mM glutamine, 75 units/mL streptomycin and 100 units/mL penicillin.

[0376] Human embryonic stem (ES) cells were maintained on mouse embryonic fibroblasts (MEFs) as previously described. 14 Cardiomyocytes were differentiated from WA09 (H9) ES cells using a directed differentiation approach in defined media for efficient cardiogenesis. After 30 days of differentiation, the human embryonic stem cell-derived cardiomyocytes (hESC-CMs) were used in this study.

### Real-Time PCR Quantification

[0377] Total RNA was isolated from cultured cells and human ventricular tissue using the RNeasy Mini Kit and RNeasy Lipid Tissue Mini Kit respectively (Qiagen, Valencia, Calif.). Human heart tissue was obtained from a tissue bank maintained at Advocate Christ Cardiac Surgery Clinical Research Center.

### Transfection and Infection Assays

[0378] Fugene 6 reagents from Roche (Madison, Wis.) were used for transfection assays by following the manufacturer's instructions. Small inhibitory RNAs (siRNAs) for LUC7L3 and RBM25 were purchased from Santa Cruz Biotechnology (Santa Cruz, Calif.). Human pGIPZ lentiviral short hairpin RNAmir particles were purchased from Open Biosystems (Huntsville, Ala.). Human cardiomyocytes were placed in a 24-well plate at the density of 200,000/well. RBM25 short hairpin RNA (shRNA; 5 μL for each well based on pre-titer results) was pre-incubated with polybrene (Sigma, Milwaukee, Wis.) at final concentration 8 μg/mL for 1 h and aliquoted to each well. The scrambled shRNA group followed the same protocol. The media was replaced by regular culture media after 5 h. The infection rates and RBM25 knockdown rates were evaluated by confocal microscope (Carl Zeiss GmbH, Oberkochen, Germany) and qPCR respectively on day 2 and day 3. Green fluorescent protein (GFP)-tagged open reading frame clones of Homo sapiens LUC73 and RBM25 were purchased from ORIGENE (Rockville, Md.). The transfection assays followed the manufacturer's instructions.

### Electrophysiology

[0379] hESC-CMs were trypsinized (2.5%, Invitrogen) for 10 min and plated on 35 mm glass bottomed culture dish (MatTek, Ashland, Mass.) at cell density 40,000 cells/dish on the day before the experiments. Na+ channel currents were measured by using the whole-cell patch-clamp technique in the voltage-clamp configuration at room temperature. To measure Na+ channel currents, pipettes (3 to 4MΩ) were filled with a pipette solution containing (in mmol/L): CsCl 80, cesium aspartate 80, EGTA 11, MgCl₂ 1, CaCl₂ 1, HEPES 10, and Na₂ATP 5 (adjusted to pH 7.4 with CsOH). The bath solution consisted of (in mmol/L): NaCl 130, CsCl 5, CaCl₂ 2, MgCl₂ 1.2, HEPES 10, and glucose 5 (adjusted to pH 7.4 with CsOH).15 The holding potential was −100 mV. A voltage step protocol ranging from −80 to +70 mV with steps of 10 mV was applied to establish the presence of Na+ channel currents. The peak current density was used to plot current-voltage (1-V) curves. Nifedipine (10 μM, Sigma) was added in the bath solution to block L-type Ca+ channel currents.

### Gel Mobility Shift Assays

[0380] RNA gel mobility shift assays were performed by using the LightShift Chemiluminescent RNA electrophoretic mobility shift assay (EMSA) Kit (Pierce, Appleton, Wis.). In brief, biotinylated wild-type (CAGCAGGCGGGCAGCGGCCU) and mutant (CAGCAGGUUAGAGGCGGCCU) RNA substrates were synthesized by Invitrogen. Binding of biotinylated RNA to RBM25 was achieved by incubating 0.2 nmol/L of RNA and variable amounts of protein for 30 min at 4° C. in 20 μL of binding buffer. For the competition assays, a molar excess of unlabeled competitor RNAs at various fold levels was added to the pre-incubated reaction mixture. Samples were fractionated in a native 5% polyacrylamide gel and transferred to Hybond-N+nylon membranes (Pierce, Appleton, Wis.). The biotin-labeled RNA was detected using the streptavidin horseradish peroxidase conjugate and a chemiluminescent substrate.12

### Western Blots Assays

[0381] The Mini-PROTEAN® Tetra Electrophoresis System from BioRad (Hercules, Calif.) was used for Western blots analysis. Anti-RBM25 antibodies were provided by Dr Shu-Ching Huang (Dana-Farber Cancer Institute). Anti-LUC7L3 antibodies were purchased from Millipore (Billerica, Mass.). Anti-GFP was purchased from ORIGENE (Rockville, Md.).

### Statistics

[0382] Data are presented as means±standard error of the mean (SEM). Means were compared using unpaired Student's t test or one-way analysis of variance (ANOVA). A probability value P<0.05 was considered statistically significant.

### Clinical Specimens

[0383] The microarray study samples were composed of end-stage cardiomyopathy hearts (n=10) and nonfailing control hearts (n=6).1 End-stage cardiomyopathy heart samples were obtained at the time of left ventricular assist device (LVAD) placement or cardiac transplantation. Subjects with end-stage cardiomyopathy exhibited severely reduced ejection fraction, left ventricular dilation, elevated pulmonary arterial and wedge pressures, and a reduced cardiac index. The control subjects were younger (median age 42 years with an interquartile range of 24-50 years) and predominantly male.

### Data Analysis Methods

[0384] The GeneSifter gene expression microarray data analysis system was used to identify and compare significant differentially expressed genes from human (GEO accession: GSE1869)1 heart failure tissue-derived gene expression data. The data were uploaded to GeneSifter by Batch Upload with the option to use Affymetrix probe IDs. No data points were missing from any of the files. The z score was used as a measure of the significance of observed genes compared to a normal distribution. A z score was considered significant if it was >2 or <−2, implying the genes were significantly over-represented or under-represented. Statistically significant gene changes were identified using an unpaired Student's t test, p value<0.05 and a 5% Benjamini and Hochberg false discovery rate (FDR) correction. These settings are similar to those used by Kittleson et al.1 A range of fold change cutoffs was used. For functional analysis, gene ontology (GO) reports were generated according to the method of Doniger et al.2 Genes associated with RNA splicing were found under the biological process GO term “GO:0008380 RNA splicing”. The upregulated splicing factors are listed in Table 1. No significant downregulation of splicing factors was observed. Hierarchical clustering of these genes across samples was done using the average correlation approach through Bioconductor (Fred Hutchinson Cancer Research Center). The heatmap (FIG. 1) represents the relationship of genes and samples to one another with green representing downregulated and red representing upregulated genes relative to the mean expression value of each gene.

Altered mRNA Profiles of Splicing Factors in Human HF Tissue

[0385] A mRNA microarray analysis was used to identify and compare splicing factors in both normal and human HF tissues. Of the 181 known human splicing factors analyzed, 17 were upregulated in HF. These splicing factors were grouped according to known pathogenic regulators, such as hypoxia, inflammation, wall tension, or hormonal factors, involved in HF (Table 1).

TABLE 1
Comprehensive list for human HF-related splicing factors

| Pathogenic regulation | |
|---|---|
| involved | Gene symbol |
| Hypoxia | RBM25; LUC7L3; TARDBP; HNRPH3; PPIG |
| Inflammation | BAT1; RBM39; IVNS1ABP |
| Hormone level changing | BAT1 |
| Overloading pressure | RBM39 |
| Others | YTHDC1; SFPQ; QKI; HNRNPA1; TRA2A |

### Upregulation of RBM25 and LUC7L3 in Human HF Tissue

[0386] The cis-element, CGGGCA, of splicing factor RBM25 was found to be near the splicing sites of SCN5A variants E28C and E28D. RBM25 requires LUC7L3 to be active in splicing regulation, so both RBM25 and LUC7L3 were evaluated further for a role in SCN5A mRNA splicing regulation. Of the other 45 splicing factors upregulated, based on known cis-element sequence, none is known to bind to or has canonical binding sequences that are present in SCN5A.

[0387] The upregulation of splicing factors RBM25 and LUC7L3 was confirmed in human HF tissue by qPCR. Compared to the normal human heart tissue, the results indicated that the relative abundances of RBM25 and LUC7L3 were increased by 1.1-fold and 0.6-fold in HF tissue respectively (P<0.05, FIG. 23A). Full length SCN5A mRNA was reduced by 0.6-fold in HF tissue (P<0.05, FIG. 23A), a result similar to our previous report.8 mRNA findings were correlated with protein expression by Western blots. The representative Western blots are shown in FIG. 23B. Compared to the control group (mixture of 4 normal human heart tissue samples), Western blot quantification showed that RBM25 was increased by 0.5- to 0.6-fold in HF tissue samples 1-4, respectively (P<0.05, three replications for each sample). The gel density of LUC7L3 was increased by 0.6- to 0.7-fold in the same HF tissue samples (P<0.05, three replications for each sample).

RBM25 Associates with SCN5A and Interacts with CGGGCA

[0388] Gel mobility shift assays showed that RMB25 was bound to the canonical sequence, CGGGCA, in SCN5A exon 28 (FIG. 24). Scanning the entire SCN5A RNA sequence revealed only a single binding site for RBM25 at the place where SCN5A splicing variants were detected (FIG. 2A). Binding of biotinylated wild-type (CAGCAGGCGGGCAGCGGCCU) RNA to RBM25 was observed in FIGS. 2B-D. The results illustrated that RBM25 binding was specific to the sequence CGGGCA. RBM25 was bound to the wild-type SCN5A sequence in a concentration-dependent manner (FIG. 24B). For the competition assays, a molar excess of unlabeled competitor RNAs at various fold levels was added to the pre-incubated reaction mixture (FIG. 2D). Specificity was confirmed by showing a lack of this binding to a mutated canonical binding sequence (FIG. 24C) and the inability of unlabeled probe to compete with labeled probe for RBM25 binding (FIG. 24D).

### Example 6

[0389] This example demonstrates Ang-II and hypoxia regulate RBM25, hLuc7A, and SCN5A mRNA splicing, as shown in one or both of Gao et al., Circulation, 124(10):1124-31 (published online on Aug. 22, 2011) and in International Patent Application Publication No. WO/2010/129964.

Ang II and Hypoxia Regulated RBM25, LUC7L3 Expression as well as SCN5A mRNA Splicing

[0390] Ang II and hypoxia are common pathogenic factors in HF and were identified in the microarray analysis as possible upstream stimuli responsible for the changes in mRNA splicing factors (Table 1). SCN5A mRNA is known to be transcribed in skeletal muscle and leukocytes. We have reported that leukocytes have a similar mRNA splicing pattern to that in heart. Moreover, circulating leukocytes from HF patients showed a four-fold increase in the Ang II type 1 receptor (data not shown). Therefore, Jurkat cells, an immortalized line of T lymphocyte cells, which prominently express SCN5A, were chosen to be as an initial model to study the SCN5A regulation mechanism.

[0391] Jurkat cells were divided into three experiment groups: untreated control, hypoxia-treated (1% O₂), and Ang II-treated (200 nmol/L). The cells were harvested from each experiment group at four time points (30 min, 24 h, 48 h, and 72 h), and total mRNA was extracted. The expressions of RBM25 and LUC7L3 were examined by qPCR, and the results at 48 h are shown in FIG. 25A. HIF-1α was used as the indicator of cellular hypoxic stress. Under the hypoxia-treated condition, the expressions of RBM25 and LUC7L3 in Jurkat cells were increased by 2.4-fold and 4.9-fold, respectively (P<0.05). Under the Ang II-treated condition, the expressions of RBM25 and LUC7L3 in Jurkat cells were increased by 2.1-fold and 1.9-fold respectively (P<0.05). The expressions of RBM25 and LUC7L3 were analyzed by Western blots at three time points (12 h, 24 h, and 48 h) for the hypoxia-treated group and at four time points (24 h, 48 h, 72 h, and 96 h) for the Ang II-treated group. Western blot quantification showed that RBM25 was increased by 1.9-, 2.0- and 1.5-fold in the hypoxia-treated group at time points 12 h, 24 h and 48 h, respectively and was increased by 2.1-, 2.1-, 1.9- and 2.0-fold in the Ang II-treated group at 24 h, 48 h, 72 h and 96 h, respectively (P<0.05). The gel density of LUC7L3 was increased by 2.4-, 2.4- and 2.7-fold in the hypoxia-treated group at time points 12 h, 24 h and 48 h, respectively and was increased by 2.6-, 2.5-, 2.8- and 2.8-fold in the Ang II-treated group at time points 24 h, 48 h, 72 h and 96 h, respectively (P<0.05). The representative Western blots and quantification (based on three replications for each group) are shown in FIG. 25B.

[0392] The effect of hypoxia and Ang II on the SCN5A variants E28C and E28D in Jurkat cells was studied also to correlate SCN5A variants with RBM25 and LUC7L3 abundances. The expressions of the full length SCN5A transcript and SCN5A variants E28C and E28D at 48 h are shown in FIG. 25C. With hypoxia, the expressions of SCN5A variants E28C and E28D were increased by 3.7-fold and 6.4-fold, respectively (P<0.05), while the expression of the full length SCN5A transcript was decreased by 0.7-fold (P<0.05). With Ang II, the expressions of SCN5A variants E28C and E28D were increased by 2.9-fold and 4.3-fold, respectively (P<0.05), while the expression of the full length SCN5A transcript was decreased by 0.8-fold (P<0.05).

[0393] siRNAs for these two splicing factors were found to block partially the increases in the hypoxia or Ang II-induced SCN5A variants E28C and E28D at 48 h (FIG. 25D-E). The partial effect on reducing abnormal splicing may be due to the siRNA knockdown efficiencies were 60±5% and 70±5% estimated by qPCR and 63±7% and 69±6%. by Western blots for RBM25 and LUC7L3, respectively.

[0394] While downregulation of the two splicing factors in Jurkat cells reduced the SCN5A variants E28C and E28D, overexpression of RBM25 and LUC7L3 increased E28C and E28D and decreased the full length SCN5A mRNA abundances. The expressions of the full length SCN5A transcript and SCN5A variants E28C and E28D at 48 h are shown in FIG. 25F. With overexpression of RBM25, the expressions of SCN5A variants E28C and E28D were increased by 1.6-fold and 2.5-fold, respectively (P<0.05), while the expression of the full length SCN5A transcript was decreased by 0.6-fold (P<0.05). With overexpression of LUC7L3, the expressions of SCN5A variants E28C and E28D were increased by 1.1-fold and 1.9-fold, respectively (P<0.05), while the expression of the full length SCN5A transcript was decreased by 0.7-fold (P<0.05).

The Effect of Ang II on Na⁺ Channels in hESC-CMs

[0395] The effect of Ang II on the cardiac Na+ channel was investigated in hESC-CMs. hESC-CMs were plated on a 24-well culture plate on day 30 of differentiation. The cells were divided into three experiment groups: Ang II-treated (200 nmol/L), Ang II-treated (200 nmol/L) and pre-infected by pGIPZ lentiviral RBM25 shRNAmir, and Ang II-treated (200 nmol/L) and pre-infected by scrambled shRNA. Ang II (200 nmol/L) treatment was given to all the experiment groups on infection day 3. When cells were pre-infected by RBM25 shRNA, the expression of the full length SCN5A transcript was increased by 0.4-fold, while the expressions of SCN5A variants E28C and E28D were decreased by 0.4-fold and 0.5-fold, respectively (P<0.05). qPCR measurements were performed in each experiment group at 24 h after Ang II treatment and normalized by β-actin. No changes were observed when cells were pre-infected by scrambled shRNA, however. The results indicated that Ang II-mediated SCN5A downregulation was dependent on the splicing factor RBM25 (FIG. 26A). The infection rate was 90±6%, evaluated by the ratio of GFP positive cells (pGIPZ lentiviral infected cells) to total cells. RBM25 knockdown efficiency was 70±5%, evaluated by both qPCR and Western blots (FIG. 26B).

Abnormal Na⁺ Channel mRNA Processing Altered Na⁺ Channel Current

[0396] The implications of Na+ channel mRNA processing changes were tested by measuring Na+ current in hESC-CMs by the whole-cell voltage-clamp technique. hESC-CMs were used to most accurately mimic clinical conditions and because a suitable animal model has not been validated. The cells were divided into four experiment groups: Control, Ang II-treated (200 nmol/L), Ang II-treated (200 nmol/L) and pre-infected by RBM25 shRNA, and Ang II-treated (200 nmol/L) and pre-infected by scrambled shRNA. Given that RBM25 regulates pre-mRNA alternative splicing by recruiting LUC7L3,12 loss-of-function of RBM25 with lentiviral shRNA was used exclusively to suppress abnormal channel splicing. The macroscopic Na+ channel currents in each experiment group were measured. The results from the first three experiment groups at 24 h after Ang II treatment are shown in FIG. 27. There was a significant difference in peak currents between control cells and Ang II-treated cells at membrane potentials ranging from −40 to +30 mV (P<0.05). The effect of Ang II on peak current was not observed when the cells were pre-infected by RBM25 shRNA before Ang II treatment. Non-specific effects of the lentivirus were excluded by comparing with the cells pre-infected by scrambled shRNA, which had no effect on the I-V relationship compared to Ang II alone (data not shown). The results indicated that Ang II could downregulate Na+ channel currents in hESC-CMs and that this downregulation was dependent on the splicing factor RBM25.

### Example 7

[0397] This example demonstrates that SCN5A variants activate the unfolded protein response (UPR), as shown in International Patent Application Publication No. WO/2010/129964.

[0398] Previously, we have shown that SCN5A splicing variants have a dominant negative effect on Na⁺ current (Shang et al., Circ. Res., 101:1146-1154 (2007)). Since the Na⁺ channel is encoded by a single mRNA, it is unclear how truncated forms might have a dominant negative effect on full-length channel production. The following Example investigated whether truncated SCN5A variant activate the unfolded protein response (UPR) pathway.

[0399] Hypoxia and AngII were used to increase abnormal SCN5A splicing. The expressions of PERK and sXBP1 were measured by R_{T}-PCR. The expression of PERK was increased at 48 h by 18.6±0.8 fold (p<0.05) and 14.2±0.6 fold (p<0.05) under hypoxia-treated and Ang II-treated conditions respectively, while no expression upregulation of sXBP1 was observed. To test if this upregulation of one arm of the UPR was mediated by SCN5A mRNA variants, exogenous E28C and E28D were introduced. The Jurkat cells were divided into four experiment groups: normal control, empty vector control, variant E28C overexpressioned cells, and variant E28D overexpressioned cells. The expression of PERK was measured by R_{T}-PCR in each group at the time point 48 h. Results indicated that the expression of PERK was increased by 6.3±0.4 (p<0.05) fold and 7.9±0.5 fold (p<0.05) when the variants E28C or E28D were overexpressed. The upregulation of PERK in Jurkat cells was further confirmed by Western blot. Compared to the control group, Western blot analysis showed that the density of PERK was increased by 437.9±11.2%, 383.2±10.7% under hypoxia-treated and Ang II-treated conditions respectively (p<0.05), and was increased by 262.6±9.6% and 359.5±10.1% in cells overexpressing variants E28C or E28D respectively (p<0.05). Furthermore, siRNA against PERK partially reversed the downregulation of full-length SCN5A expression after hypoxia or Ang II treatment. siRNA knockdown efficiency not less than 50%.

### Example 8

[0400] This example demonstrates the role of PERK-mediated unfolded protein response pathway in the regulation of cardiac sodium channel during human heart failure, as previously described.

[0401] The unfolded protein response (UPR) is a series of interrelated signaling pathways that occur when the endoplasmic reticulum (ER) experiences excess secretory load, accumulates misfiled proteins, or is subject to other pathological conditions. UPR acts to attenuating general protein synthesis, induces the expression of ER chaperone proteins, and enhances the degradation of misfiled proteins. In published work, we have shown that heart failure (HF) increases alternative splicing of the SCN5A gene (encoding cardiac sodium channel), generating mRNA variants E28C and E28D encoding truncated, nonfunctional sodium channel. The presence of these variants causes a dominant negative downregulation of the wild-type SCN5A mRNA and sodium current to a sufficient extent to be arrthmogenic. We tested whether PERK-mediated UPR contributed to the dominant negative effect on Na⁺ current when truncated sodium channel mRNA variants are present in HF.

[0402] The correlation of expression changes among PERK, major human embryonic stem cell-derived cardiomyocytes (hESC-CMs). Hypoxia and Ang II were used as induces or abnormal splicing since they have been shown to mediate some of the pathological consequences of HF>hESC-CMs were divided into six experimental groups: normoxic, 1% O₂ hypoxia treated, 100 nmol/L Ang II-treated, E28C overexpressed, E28D overexpressed, and empty vector control. E28C and E28D constructs were transduced to overexpress the truncated proteins.

[0403] The expression of major UPR components (PERK, calnexin, CHOP) were increased in HF tissues and cardiac Na+ channels were downregulated. In hESC-CMs, induction of SCN5A variants E28C and E28D with Ang II or hypoxia as well as expression of exogenous variants could induce major UPR components (PERK, calnexin, CHOP). Finally, downregualtion of PERK prevented the loss of full-length SCN5A mRNA abundance with these stimuli.

[0404] SCN5A variants could induce the expression of major UPR components and could induce PERK-mediated Na+ channeled downregulation. The results indicate that the UPR contributes to Na+ channel downregulation during human HF.

### Example 9

[0405] We have reported that SCN5A, the gene encoding the α-subunit of the cardiac Na+ channel, has two mRNA alternative splicing variants that are upregulated in human heart failure (HF). These splicing variants do not form functional channels, and their presence reduces conduction velocity between cardiomyocytes. Therefore, abnormal Na+ channel splicing may contribute to arrhythmic risk in HF. Further studies indicated that splicing factors RBM25 and hLuc7A lead to the abnormal mRNA processing. Our data also show that immortalized B cells express cardiac Na+ channel variants identically to those in heart tissue and may serve as a surrogate for abnormal cardiac splicing.

[0406] We tested whether white blood cell (WBC) Na+ channel mRNA splicing varied as a function of the presence or absence of HF.

[0407] Methods:

[0408] One hundred eighty adult patients were recruited into this study, 45 controls without HF (Ejection Fraction (EF)>60%) and 135 with HF (EF<35%). Patients with congenital heart disease, infections, and inflammatory conditions were excluded. Total RNA was extracted from WBCs. The mRNA abundances of SCN5A, SCN5A variants, and the splicing factors RBM25 and hLuc7a were determined by real-time PCR.

[0409] Results:

[0410] The ratio of WBC SCN5A variants E28C or E28D to the full-length SCN5A transcript was increased in HF patients as compared to the control group. The average fold inductions were 5.0±2.7 and 7.0±3.5 for SCN5A variants E28C and E28D respectively (p<0.05). These changes were greater than those observed in cardiac tissue. The WBC mRNA abundances of RBM25 and hLuc7a also were increased in HF. The average increases for RBM25 and hLuc7A were 67.0±7.8% and 73.0±9.3% respectively (p<0.05). These changes were similar to those in heart tissue which we reported before. Conclusion: A distinct pattern of increased pathogenic splicing factors and abnormal Na+ channel splicing was present in circulating WBCs of HF patients, suggesting that WBC mRNA splicing may be affected by the same processes as occur in the heart and that WBC mRNA splicing may serve as a surrogate for the arrhythmic risk related to Na+ channel downregulation in the heart.

### Example 10

[0411] This example provides a description of a human clinical trial known as SOCS-HEFT (Sodium Channel Splicing in Heart Failure Trial, NCT01185587), which to date is an ongoing clinical trial.

[0412] We hypothesized that (1) patients with reduced left ventricular ejection fraction have increased abundances of truncated mRNA splice variants of the SCN5A gene, which portends to sodium channel dysfunction and an increased risk for sudden cardiac death and (2) patients with implantable cardioverter-defibrillator devices (ICDs) who have experienced shock therapy have increased abundances of truncated mRNA splice variants of the SCN5A gene compared to similar congestive heart failure patients who have not experienced shock therapy.

[0413] To test these hypotheses, we initiated the SOCS-HEFT trial as essentially described below.

[0414] The specific aims and objectives of this study was to (i) determine the abundances of SCN5A mRNA splice variants in patients with chronic heart failure (CHF) and baseline ejection fractions less than 35% versus normal controls of similar age groups and (ii) to compare the abundances of SCN5A mRNA splice variants in patients with ICD devices who have and have not experienced ICD shock therapy. The study was designed to correlate the amount of white cell Na+ channel splice variants with ejection fraction in patients with an without heart failure and to correlate the amount of white cell Na+ channel splice variants with the number of appropriate ICD shock in patients with ICDs in place.

[0415] The study participants were primarily adult patients with acquired heart failure (not secondary to congenital heart disease) from any cause both with and without ICD devices. Patients with normal left ventricular function and no evidence of diastolic dysfunction by echocardiographic assessment were also included in the study as control patients. These patients did not have cardiac disease or ICD devices.

[0416] The following eligibility criteria was used when selecting study participants:
[0417] 1. All patients must be greater than 18 years of age
[0418] 2. Patients with reduced left ventricular function (i.e., heart failure patients) must have acquired heart failure and an ejection fraction less than 35% documented in the last two years by any methodology
[0419] 3. Control population patients must be free of heart failure symptoms, diastolic dysfunction, and left ventricular systolic dysfunction documented by any methodology within 1 year of study enrollment
[0420] 4. Patients with an ICD in place for more than 1 year and evidence of ICD events
[0421] 5. Patients with an ICD in place for more than 1 year and no evidence of ICD events
[0422] 6. All patients must be able to give informed consent

[0423] The following ineligibility criteria was used when excluding study participants:
[0424] 1. Patients less than 18 years of age.
[0425] 2. History of congenital heart disease as cause of impaired left ventricular function.
[0426] 3. Control patients with impaired left ventricular systolic function or the presence of diastolic dysfunction.
[0427] 4. Control or Study group patients with a history of congenital electrophysiological disorders like the long-QT syndrome or Brugada disease will not be included.
[0428] 5. Control or Study group patients who require antiarrhythmic drugs other than Vaughn-Williams Class II and IV agents.
[0429] 6. Control patients with a history of significant illness that may otherwise impair cardiac function within 12 months of study enrollment. These conditions include: myocardial infarction, cardiac hospitalization, cardiac arrhythmia, infection, or cancer.
[0430] 7. ICD patients suffering from any other terminal or chronic inflammatory illness.
[0431] 8. Patients taking immunosuppressive medications, have chronic infection, or have an acute or chronic inflammatory illness that might alter white cell mRNA expression.
[0432] 9. Patients with any illness expected to result in death within 18 months of enrollment.
[0433] 10. Patients with white blood cell dyscrasia or cancers.
[0434] 11. Current illicit drug use.
[0435] 12. Inability to give informed consent.

[0436] The following pre-enrollment evaluation was performed on potential study participants:
[0437] 1. History and physical exam
[0438] 2. Record current medications, including but not limited to angiotensin converting enzyme inhibitors (ACE inhibitors), statins, antiarrhythmic drugs, and angiotensin receptor blockers (ARBs).
[0439] 3. Patients with ICD devices will have their device interrogations reviewed for the presence of shocks.

[0440] The duration of the subject participation was determined as follows: A single blood draw was requested at the time of enrollment and analyzed for levels of SCN5A mRNA splice variants. Patients had their medical records examined retrospectively from the date of enrollment for cardiac specific information such as ICD interrogation records, ECG, Echo lab results, etc. This study did not require any change in the standard of care. All study participants were subjected to phlebotomy at the time of enrollment. There were no monitoring parameters in this study. A patient may voluntarily withdrawal from the study at any time.

[0441] The outcome assessment was as follows: During the initial evaluation, demographic and past medical history data were recorded. This information included: age, race, sex, body mass index, blood pressure, New York Heart Association class, history of myocardial infarction and hypertension, diabetes status, tobacco and alcohol use, presence and type of pacemaker device. Age at diagnosis of heart failure was recorded. Additionally, review of previous cardiac testing was recorded. The types of tests reviewed included electrocardiograms, echocardiograms, coronary angiograms, and results of cardiac nuclear studies. A sample of each study participant's blood was taken for assessing the levels of SCN5A mRNA splice variants. We will also looked at angiotensin converting enzyme (ACE) level and activity, angiotensin II (Ang II), and hypoxia-inducible factor (HIF-1α) mRNA because we have recently shown Ang II and hypoxia are upstream signals for abnormal SCN5A mRNA splicing.

[0442] The sample collection and processing of this study occurred as follows: About 15 ml of blood was drawn from study participants from UIC or JBVAMC who have given informed consent for phlebotomy and study participation. Samples were delivered immediately by study staff for processing within 2 hours of collection. Levels of mRNA were measured and some of the processed sample may have been stored in a −80° F. freezer in the same lab for up to 7 years. Samples were not stored or processed at JBVAMC or any other facility.

[0443] The statistical considerations of the study were as follows: The relationship of Na⁺ channel mRNA variant abundances were compared in subjects with and without heart failure and in subjects with and without ICD events. The primary endpoint was the comparison of mRNA variant abundances. Dependent variables included heart failure and number of shocks. The number of patients needed for goal of this study was determined by the variance of the test, the mean difference expected, and some consideration of the number of covariates that will need to analyzed in the regression analysis. Previously, we showed that the least sensitive measure was a reduction in E28A abundance by 24%. If we assume that the same percentage reduction will happen in goal 1 and 2, then we would need about 45 patients in each group to have a 90% power to detect this difference, assuming a 10% loss rate due to technical errors in the assays. Therefore, we would need a total of 180 patients for the total trial, 45 with heart failure, 45 controls, 45 ICD patients with events, and 45 patients without events.

[0444] Baseline data was expressed as mean±SD for continuous variables, and frequencies for categorical variables. Differences in baseline characteristics between the groups will be examined by use of Fisher exact and Mann-Whitney tests for categorical and continuous variables, respectively. Because the number of ICD events recorded is a function of the observation time, Poisson regression was used to model any relationship. In this model, the number of ICD events observed is assumed to be distributed following a Poisson distribution. That is, for a given period of time, the probability that a certain number of events has occurred is a function of the event rate multiplied by the duration of observation. In order to estimate the effects of mRNA variants on the rate of event occurrence, it was assumed that the event rate was log linear with respect to the predictors of interest. Solving this equation gave rate ratios comparing the rate of event occurrence in subjects with and without ICD events. Multiple expressions for the mRNA variant abundances were considered, such as the relative abundance of each variant individually, the abundance of the individual variant as a function of the total Na⁺ channel mRNA, and the ratio of the truncations to the full-length Na⁺ channel mRNA. The regression coefficient was estimated for the relationship between the dependent variable, ICD events, and the independent variables as the log of the rate ratio estimates. Statistical significance was determined by using the likelihood ratio test. A p-value of 0.05 or less was taken to be statistically significant. Results were reported as the risk ratio and its associated 95% confidence interval. In order to select variables to be included in the model, we considered, conservatively, those variables with a different distribution between the two groups at a p<0.20. The possibility of multicolinearity was evaluated. Linear and non-linear terms were considered. Normality of the variable distributions were tested by a normal probability plot and by a Shapiro-Wilk test. While regression is fairly tolerant of violations in this regard, transformations were investigated as necessary. Homoscedasticity was evaluated by plot of residuals versus predicted values. Discrimination of the model was evaluated by an overall C index and validated by bootstrap methods.

[0445] The safety monitoring and assessment of this study were as follows: As this was a cross-sectional cohort comparison trial with minimal risk to patients. There was no data safety monitoring board. All data was collected in compliance with existing law and regulations. Data was stored in a de-identified manner in a controlled access location. We do not anticipate any complications with acquiring blood samples, analyzing mRNA variants, or performing the statistics. Nevertheless, the major limitation to this trial is its retrospective nature. Nevertheless, this data will be useful in the design of future prospective trials.

[0446] The following references were considered in this example:
[0447] 1. Hunt S, et al. ACC/AHA Guideline Update for the Diagnosis and Management of Chronic Heart Failure in the Adult. Circulation 2005; 112:e154.
[0448] 2. Rosamond R et al. Heart Disease and Stroke Statistics 2008 Update. A Report From the American Heart Association Statistics Committee and Stroke Statisitics Subcommitte. Circulation Epub 2007 Dec. 13.
[0449] 3. Kannel W B, Plehn J F and Cupples L A. Cardiac failure and sudden death in the Framingham Study. Am Heart J. 1988; 115:869-75.
[0450] 4. Bardy G H et al. Amiodarone or an Implantable Cardioverter-Defibrillator for Congestive Heart Failure. N Engl J Med 2005; 352:225-37.
[0451] 5. Meregalli P G, Wilde A A M, and Tan, H L. Pathophysiological mechanisms of Brugada syndrome: depoloarization disorder, repolarization disorder, or more? Cardiovasc Res. 2005; 64:367-378.
[0452] 6. Wang Q, Shen J, Splawski I, et al. SCN5A Mutations Associated with an Inherited Cardiac Arrhythmia, Long Q T Syndrome. Cell; 1995:80:805-811.
[0453] 7. Makita n, Horie M, Nakamura T, et al. Drug-induced long-WT Syndrome Associated with a Subclinical SCN5A Mutation. Circulation. 2002; 106:1269-1274.
[0454] 8. Nguyen T P, Want D W, Rhodes T H, George A L. Divergent Biophysical Defects Caused by Mutant Sodium Channels in Dilated Cardiomyopathy with Arrhythmia. Circ Res. 2008; 102:0-0.
[0455] 9. Chen Q, Kirsch G E, Zhang D, Brugada R et al. Genetic Basis and Molecular Mechanism for Idiopathic Ventricular Fibrillation. Nature. 1998; 392:293-295.
[0456] 10. Valdivia C R, Chu W W, P J, Foell J D, et al. Increased Late Sodium Current in Myocytes from a Canine Heart Failure Model and from Failing Human Heart. J Moll Cell Cardiol. 2005; 38:475-483.
[0457] 11. Smits J P, Koopmann T T, Wilders R, et al. A Mutation in the Human Cardiac Sodium Channel (E161K) Contributes to Sick Sinus Syndrome, Conduction Disease, and Brugada Syndrome in Two Families. J Mol Cell Cardiol. 2005; 38:969-81.
[0458] 12. Janse M J. Electrophysiological Changes in Heart Failure and Their Relationship to Arrhythmogenesis. Cardiovasc Res. 2004; 208-17.
[0459] 13. Armoundas A A, Wu R, Juang G, et al. Electrical and Structural Remodeling of the Failing Ventricle. Pharmacol Ther. 2001; 92:213-30.
[0460] 14. Albert C M, Nam E G, Rimm E B, et al. Cardiac Sodium Channel Gene Variants and Sudden Cardiac Death in Women. Circulation. 2008:117; 00-00.
[0461] 15. Hong K, Guerchicoff A, ollevick G D, et al. Crypitc 5′ splice site activation in SCN5A associated with Brugada Syndrome. J Mol Cell Cardiol. 2005:38; 555-560.
[0462] 16. Shang L L, Pfahnl A E, Sanyal S, et al. 2007:101; 1146-54.
[0463] 17. Halbach M, Egert U, Hescheler J, and Banach K. Estimation of Action Potential Changes from Field Potential Recordings in Multicellular Mouse Cardiac Myocyte Cultures. 2003:13; 271-284.

### Example 11

[0464] This example demonstrates white blood cell (WBC) SCN5A alternative splicing correlates with cardiac SCN5A splicing.

[0465] Based on data from SOCS-HEFT, we have established that WBC and left ventricular SCN5A splicing variant abundances are highly correlative. Using Left Ventricular Assist Device core samples and concurrently obtained blood samples, we have shown that there is a significant degree of correlation between normalized variant levels in the heart and blood. (FIG. 29) These data suggest that a blood test for variants is likely to reflect changes in the heart.

### Example 12

[0466] This example demonstrates that increased WBC splicing variants are predictive of appropriate ICD discharge.

[0467] Based on data from the SOCS-HEFT trial, we were able to show that both variants E28C and E28D were increased in the blood of ICD patients as compared to controls. In addition, variant levels were considerably elevated in patients with an appropriate ICD discharge for ventricular tachycardia or fibrillation within a 12-month period preceding the sample acquisition, and there was little overlap in the distribution of variant abundances between groups (FIG. 30). Current trial enrollment is 28 controls, 34 ICD patients without a discharge, and 15 patients with an appropriate discharge (a reasonable surrogate for sudden death). Although retrospective and with small numbers, the trial results are already statistically significant for the use of SCN5A variants to predict shock risk in patients with an ICD.

[0468] Moreover, using a cut off of 4.0 for E28C or 2.8 for E28D, the sensitivity and specificity for prediction of shock risk is 100% and 85%, respectively with an area under the curve (AUC) of 0.96±0.03 for E28C and 0.95±0.03 for E28D (p<0.001, FIG. 30). This implies that the proposed blood test has the highest AUC of any test available for prediction of sudden death.

[0469] The following demonstrates how calculations were made based on the Gaussian distribution curves of FIG. 30:

[0470] In probability theory, Gaussian distribution is a continuous probability distribution that has a bell-shaped probability density function, known as the Gaussian function:

$$f ( x ) = \frac{1}{\sqrt{2 {πσ}^{2 }}} {e}^{- \frac{{( x - μ )}^{2}}{2 {σ}^{2}}}$$

where parameter μ is the mean or expectation (location of the peak) and σ is the standard deviation.

[0471] Distributions of E28C/SCN5a (abundance ratio of SCN5a splice variant E28C to SCN5a) and E28D/SCN5a (abundance ratio of SCN5a splice variant E28D to SCN5a) in control and ICD patients (with or without shock) follow Gaussian distribution. The control's Gaussian distribution has a smaller mean and a smaller standard deviation, corresponding to a very narrow bell-shaped probability distribution. The Gaussian distribution of ICD patients without shock has a larger mean and a larger standard deviation, corresponding to a wider bell-shaped probability distribution. The Gaussian distribution of ICD patients with shock has the largest mean and the largest standard deviation, corresponding to the widest bell-shaped probability distribution farthest away from the ordinate.

[0472] Normally the abundances of SCN5a and its splice variants E28C and E28D in ICD patients are calibrated by some kind of algorithm, prior to the calculation of VC/SCN5a and VD/SCN5a. The following is an example. First, the abundance difference ΔCt between ICD patients and control is calculated for β-actin, SCN5a and its splice variants E28C and E28D. Second, ΔΔCt_{SCN5a}=ΔCt_{SCN5a}−ΔCt_{β-actin}, ΔΔCt_{E28c}=ΔCt_{E28C}−ΔCt_{β-actin} and ΔΔCt_{E28D}=ΔCt_{E28D}−ΔCt_{β-actin} are calculated. Then the calibrated abundances of SCN5a and its splice variants E28C and E28D in ICD patients are obtained by the formula: 2 to the power of minus ΔΔCt_{SCN5a}, minus ΔΔCt_{E28c} and minus ΔΔCt_{E28D respectively. Last, the values of VC/SCN}5a (ratio of calibrated variant E28C abundance to calibrated SCN5a abundance) and VD/SCN5a (ratio of calibrated variant E28D abundance to calibrated SCN5a abundance) are used to fit Gaussian distributions in ICD patients.

[0473] To fit Gaussian distributions, the raw values of VC/SCN5a and VD/SCN5a can be binned to maximize the variance of the distribution of values within each bin. For example, when VC/SCN5a or VD/SCN5a is larger than or equal to 5.5 and smaller than 6.5, all the relevant values can be bucketized to the same bin center value 6.0, which has a bin width 1.0. The Gaussian distribution fitting results depend to some degree on the value of bin width.

[0474] Fitting a Gaussian distribution can be done by software, such as GraphPad Prism. The frequency distribution is specified to be plotted as an XY plot, wherein the frequencies are Y values, and VC/SCN5a or VD/SCN5a bin centers are X values. When software GraphPad Prism is used, Analyze function is clicked after the input of XY values. Then nonlinear regression, the Gaussian family of equations and the Gaussian model are chosen in turn to create a Gaussian-type frequency distribution.

[0475] VC/SCN5a value of 4.1 and VD/SCN5a value of 2.6 can be chosen as the criteria to predict the possibility with which ICD patients may have a shock. According to the existing clinical data, 99% of ICD patients with shock have VC/SCN5a values larger than 4.1 and VD/SCN5a values larger than 2.6, while 8% of ICD patients without shock have VC/SCN5a values larger than 4.1 and 16% of ICD patients without shock have VD/SCN5a values larger than 2.6.96% of ICD patients with shock have VC/SCN5a values larger than 4.7 and VD/SCN5a values larger than 3.5, while 3% of ICD patients without shock have VC/SCN5a values larger than 4.7 and VD/SCN5a values larger than 3.5.

[0476] The obtained values of VC/SCN5a and VD/SCN5a are then compared with the cut off values chosen as the criteria to predict the possibility with which ICD patients may have a shock. The cut off values may be specified in order to have a negative predictive value around 99%.

[0477] Based on the Gaussian distribution value table, 99% of data values are larger than the criterion value calculated by the following formula: μ−2.33σ, where μ is the mean or expectation (location of the peak) and σ is the standard deviation.

[0478] The mean value μ can be calculated by the following formula:

$$μ = \frac{1}{N} {\sum }_{i = 1}^{N} {x}_{i}$$

[0479] where N is the total number of data values, and each data value is denoted by x, (i=1, . . . , N).

[0480] The standard deviation σ can be calculated by the following formula:

$$σ = \sqrt{\frac{1}{N - 1} {\sum }_{i = 1}^{N} {( {x}_{i} - μ )}^{2}}$$

[0481] According to the existing clinical data, the Gaussian distribution of ICD patients with shock has a mean μ of 7.2 and a standard deviation σ of 1.3 for VC/SCN5a, and has a mean μ of 6.4 and a standard deviation σ of 1.6 for VD/SCN5a. Therefore, μ−2.33σ=4.1 for VC/SCN5a, and μ−2.33σ=2.6 for VD/SCN5a. As VC/SCN5a value of 4.1 and VD/SCN5a value of 2.6 are chosen as the criteria, 99% of ICD patients with shock can be identifies as positive, i.e. their VC/SCN5a>4.1 and VD/SCN5a>2.6. When only VC/SCN5a value of 4.1 is chosen as the criterion, the corresponding sensitivity and specificity is 91.7% and 91.1% respectively, and the corresponding positive and negative predictive value is 92.5% and 98.9% respectively. When only VD/SCN5a value of 2.6 is chosen as the criterion, the corresponding sensitivity and specificity is 85.3% and 83.2% respectively, and the corresponding positive and negative predictive value is 86.1% and 98.8% respectively.

[0482] The following are the formulas to calculate the sensitivity, specificity, positive predictive value and negative predictive value:

Sensitivity=TP/(TP+FP+FN)

Specificity=TN/(TN+FP+FN)

Positive predictive value=TP/(TP+FP)

Negative predictive value=TN/(TN+FN)

[0483] where TP denotes True Positive, TN denotes True Negative, FP denotes False Positive, and FN denotes False Negative. For example, once a threshold is determined, TN are those data values in the no shock group to the left of the cut off. FNs are the data values in the ICD shock group to the left of the cut off. TP and FP are the shock group and no shock group right of the cut off, respectively.

### Example 13

[0484] This example demonstrates that WBC splicing variants are increased in HF patients.

[0485] In the same SOCS-HEFT trial, we were able to show that both variants were increased in the blood of HF patients as compared to controls (FIG. 30). Current trial enrollment is 42 males and 14 females. This suggests that WBC SCN5A mRNA splicing varies as a function of HF, and since HF is associated with arrhythmic risk, it stands to reason that WBC mRNA variants may be able to predict sudden death risk.

### Example 14

[0486] This example demonstrates a cross-sectional, cohort study comparing patients with and without ICD therapies for ventricular arrhythmia.

[0487] Each patient of this study will have an ICD. Potential subjects will come from the cohort of several thousand patients followed by the three University of Illinois at Chicago teaching hospitals. Patients with adjudicated ICD therapies for malignant ventricular tachycardia (i.e. ICD events) along with an equal number of subjects without ICD events identified from the same database and chosen randomly will be asked to provide another blood sample for analysis of WBC Na+ channel mRNA splice variant abundances. Then, these abundances will be correlated with the presence of ICD events after correction for covariates discussed below. Eligibility criteria include: (1) greater than 18 years of age and (2) an ICD in place for more than 1 year so that we can evaluate retrospective risk over a reasonable period. Ineligibility criteria are listed in the Human Subjects section and will include: history of congenital heart disease, congenital arrhythmic disorders, patients taking immunosuppressive medications, having chronic infection that might alter white cell mRNA expression, patients with white blood cell dyscrasia or cancers. All patients enrolled will give written consent.

[0488] Data will be collected from subject interviews and review of hospital and clinic charts. Demographic data obtained will include: age, race, body mass index, New York Heart Association (NYHA) functional class, and a history of previous myocardial infarction, hypertension, diabetes, smoking, or alcohol use. Additionally, all medications being taken at the time of enrollment and the date and method of EF determination will be recorded.

[0489] A single blood draw will be performed at the time of enrollment. Total RNA will be isolated acutely from WBCs and will be analyzed for the various forms of Na+ channel splice variations using real-time R_{T}-PCR. Total RNA will be used for synthesizing cDNA by reverse transcription using iScript cDNA synthesis Kit (Bio-Rad, Hercules, Calif.) following the manufacturer's instructions. All amplifications will be performed in duplicate and consist of 40 cycles of 30 s at 94° C., 30 s at 65° C., and 1 min at 72° C. in a BioRad thermocycler iCycler (Hercules, Calif.). PCR products will be analyzed by electrophoresis on 1.5% agarose gels. Beta-actin and GAPDH will be used as internal references when making quantitative comparison.

[0490] The smallest change in mRNA isoform abundance noted above between HF and control patients was for the full-length transcript, which was reduced by 25%. Using this smallest change as the basis for a power analysis, enrolling 37 subjects in each group would give a 90% power to detect this difference using a two-tailed alpha level of 0.05. Based on this and the need to have enough subjects to correct for covariates, we will enroll 50 subjects in each group.

[0491] We anticipate abnormal SCN5A splicing patterns will be associated with ICD events. The relationship of Na+ channel mRNA variant abundances and patterns will be compared in subjects with and without ICD events. As above, various mRNA isoform levels will be expressed as the relative mRNA abundance and as the percent of the total Na4 channel mRNA. Baseline data will be expressed as mean±SD for continuous variables, and frequencies for categorical variables. Differences in baseline characteristics between the groups will be examined by use of Fisher exact and Mann-Whitney tests for categorical and continuous variables, respectively. Because the number of ICD events recorded is a function of the observation time, Poisson regression will be used to model any relationship. In this model, the number of ICD events observed is assumed to be distributed following a Poisson distribution. That is, for a given period of time, the probability that a certain number of events has occurred is a function of the event rate multiplied by the duration of observation. In order to estimate the effects of mRNA variants on the rate of event occurrence, it is assumed that the event rate is log linear with respect to the predictors of interest. Solving this equation gives rate ratios comparing the rate of event occurrence in subjects with and without ICD events. Multiple expressions for the mRNA variant abundances will be considered, such as the relative abundance of each variant individually, the abundance of the individual variant as a function of the total Na+ channel mRNA, and the ratio of the truncations to the full-length Na+ channel mRNA. The regression coefficient will be estimated for the relationship between the dependent variable, ICD events, and the independent variables as the log of the rate ratio estimates. Statistical significance will be determined by using the likelihood ratio test. A p-value of 0.05 or less will be taken to be statistically significant. Results will be reported as the risk ratio and its associated 95% confidence interval. In order to select variables to be included in the model, we will consider, conservatively, those variables with a different distribution between the two groups at a p<0.20. The possibility of multicolinearity will be evaluated. Linear and non-linear terms will be considered. Normality of the variable distributions will be tested by a normal probability plot and by a Shapiro-Wilk test. While regression is fairly tolerant of violations in this regard, transformations will be investigated as necessary. Homoscedasticity will be evaluated by plot of residuals versus predicted values. Discrimination of the model will be evaluated by an overall C index and validated by bootstrap methods. Data analysis will be done in collaboration with the UIC Center for Clinical Translational Science, recently funded by the National Center for Research Resources, NIH, Award Number UL 1RR029879, which maintains a biostatistical core.

[0492] We do not anticipate any complications with acquiring blood samples, analyzing mRNA variants, or performing the statistics, which are similar to that used in a recent interim GRADE analysis55 or our Statins for the Prevention of Atrial fibrillation trial (StoP-AF, NCT00252967) (56). Nevertheless, while we have shown that AngII and hypoxia affect splice variation abundance, one potential complication is other conditions may exist that influence Na+ channel splicing aside from those directed related to HF. The sample size should be large enough to allow for statistical correction of other factors, and identification of such factors may lead to risk mitigation strategies. For example, it is possible that splicing is influenced by the type of cardiomyopathy, race, gender, or EF, and this will be investigated. Our preliminary data indicates that age does not affect variation abundance in F-IF patients (data not shown). Additionally, it is recognized that even if this retrospective trial is positive, a prospective, multicenter trial will be necessary to firmly establish the usefulness of Na+ channel variants in the prediction of ICD events.

### Example 15

[0493] This example demonstrates a study for identifying patients to which administration of an anti-arrhythmic drug is safe.

[0494] Patients with an ICD and taking an anti-arrhythmic drug will be enrolled in this study. This protects them against any adverse proarrhythmic events of the drug. Levels of sodium channel variants, sodium channel splicing factors, and/or unfolded protein response (UPR) will be assessed prior to starting an anti-arrhythmic drug administration regimen. After starting the patients on the drug, patients will be monitored for appropriate shock risk therefor, in the case of ventricular arrhythmia safety and efficacy or onset/recurrence of atrial arrhythmia. The use of these drugs in atrial arrhythmias is much more common and represents a larger market.

[0495] Differences in time to relevant arrhythmia onset will be analyzed using a proportional hazards regression, estimates of the median time to the arrhythmia, and the proportion endpoint-free. Cox proportional hazards regression will be used to derive the hazards ratio for the study endpoint after adjustment for variables that may influence the outcome including age, sex, body mass index, blood pressure, NYHA classification, hypertension, smoking, number of previous CVs, LA dimension, estimated LV ejection fraction, and LV wall thickness. In the analysis, time to onset of the relevant arrhythmia will be the dependent variable and the baseline marker levels, demographic, and clinical variables will serve as independent variables. This approach will test whether treatment outcome is predicted by marker levels. The modeling will take into consideration that statins, ACE inhibitors/ARBs, nitrates and other drugs may affect our markers by including dummy indicator variables for these treatments. Discrimination of the model will be evaluated by an overall C index, validated by bootstrap methods, and fit by examining the relationship between predicted and observed recurrent arrhythmia over a range of predicted events. The proportional hazards assumption will be checked by various methods (examination of log-log plots, testing Schoenfeld residuals, inclusion of terms representing time-dependent interactions between each of the independent variables and time). Results will be reported as the hazard ratio and its associated 95% confidence interval. The significance of this hazards ratio will be assessed by the likelihood ratio test. If the hypothesis is true then the therapy must reduce the hazard ratio of AF or AFlut recurrence and also reduce markers of oxidative stress. The secondary endpoint of the ability of the intervention to decrease oxidative stress at 30 days will be analyzed by paired t tests and by multiple regression techniques to adjust for covariates.

[0496] The overall, adjusted R² will be taken as a measure of goodness of fit. The models will be refined using a stepwise backward procedure will be used, excluding variables above a value of p=0.05 for the null hypothesis that the coefficient of the independent variable in question is equal to zero. Assumptions in the analysis such as linearity of terms will be investigated examination of residuals and scatter plots of the independent variable with respect to the dependent variables. If nonlinearity is detected, transformations of the variables or fitting a nonlinear model will be attempted, and terms will be evaluated for their improvement of the model. Normality of the variable distributions will be tested by a normal probability plot and by a Shapiro-Wilk test. While regression is fairly tolerant of violations in this regard, transformations will be investigated as necessary. Homoscedasticity will be evaluated by plot of residuals versus predicted values. If the assumptions appear to be violated, we will consider non-parametric methods (e.g. Kruskall-Wallis test).

### Example 16

[0497] This example provides the results of the completed SOCS-HEFT trial originally described in Example 10.

[0498] The following is a description of the methods carried out in this example.

[0499] The clinical characteristics of study population (Table 2) and recruitment criteria. This was a cross-sectional, cohort, comparison trial, entitled “Sodium Channel Splicing in Heart Failure Trial,” (SOCS-HEFT, ClinicalTrials.gov Identifier NCT01185587) conducted at the University of Illinois at Chicago (UIC) and the Jesse Brown Veterans Administration Medical Center (JBVAMC) in Chicago, Ill. The study was approved by the Collaborative UIC/Northwestern/JBVAMC Institutional Review Board (IRB). Human heart tissue was obtained under UIC IRB approved protocol (2009-0881). This study focused on adult patients with acquired HF not secondary to congenital heart disease. All the subjects were recruited into four groups: control; HF; implantable cardioverter-defibrillator (ICD) devices without appropriate event therapy [ICD(−)Event)] and ICD with appropriate event therapy [ICD(+)Event]. An appropriate ICD event was adjudicated by an independent, blinded, clinical cardiac electrophysiologist as any device therapy delivered to interrupt ventricular fibrillation or ventricular tachycardia excluding anti-tachycardia pacing. Patients with normal left ventricular function and no evidence of diastolic dysfunction by echocardiographic assessment were included in the study as control patients. The pre-enrollment evaluation for all groups included: a history and physical examination and recording current medications including angiotensin converting enzyme inhibitors (ACE inhibitors), statins, antiarrhythmic drugs, and angiotensin receptor blockers (ARBs). All study subjects signed a written informed consent prior to enrollment. ICD programming was at the discretion of the attending physician. The ICD implant indication was predominantly primary prevention (77%). Data were collected from subject interviews and review of hospital and clinic charts. Demographic data obtained included: age, race, body mass index, and New York Heart Association (NYHA) functional class. Additionally, all medications were recorded at the time of enrollment, and the date and method of left ventricular ejection fraction (LVEF) determination were recorded. All LVEF determinations were made by echocardiography or cardiac magnetic resonance imaging. LVEF was determined in a 2-year window prior to enrollment.

TABLE 2
The clinical characteristics of the study population

| | Control | HF | ICD Without | ICD With | P Value |
|---|---|---|---|---|---|
| | (n = 28) | (n = 43) | Event (n = 42) | Event (n = 21) | (VC/VD) |
| Age-yr | 68.1 ± 12.1 | 59.9 ± 15.1 | 63.5 ± 11.1 | 62.1 ± 12.0 | 0.317/0.485 |
| | | | | | (Age≦60 yrs) |
| Male Sex-no. (%) | 26 (92.9) | 28 (65.1) | 29 (69.0) | 15 (71.4) | 0.777/0.722 |
| Race-no. (%) | | | | | |
| African American | 23 (82.1) | 29 (67.4) | 26 (61.9) | 16 (76.2) | 0.705/0.575 |
| Caucasian | 5 (17.9) | 3 (7.0) | 5 (11.9) | 1 (4.8) | 0.470/0.422 |
| Hispanic | 0 (0) | 9 (20.9) | 9 (21.4) | 4 (19.0) | 0.493/0.432 |
| Asian | 0 (0) | 1 (2.3) | 1 (2.4) | 0 (0) | 0.839/0.079 |
| Other | 0 (0) | 1 (2.3) | 1 (2.4) | 0 (0) | 0.532/0.646 |
| NYHA Class-no. (%) | | | | | 0.006/0.002 |
| | | | | | (I/II vs. III/IV) |
| I | 0 (0) | 2 (4.7) | 0 (0) | 0 (0) | |
| II | 0 (0) | 9 (20.9) | 9 (21.4) | 0 (0) | |
| III | 0 (0) | 11 (25.6) | 18 (42.9) | 4 (19.0) | |
| IV | 0 (0) | 21 (48.8) | 15 (35.7) | 17 (81.0) | |
| Ischemic Cardio- | 7 (25.0) | 19 (44.2) | 31 (73.8) | 12 (57.1) | 0.814/0.462 |
| myopathy-no. (%) | | | | | |
| Medications-no. (%) | | | | | |
| β Blocker | 8 (28.6) | 35 (81.4) | 37 (88.1) | 21 (100) | 0.005/0.046 |
| ACE Inhibitor | 12 (42.9) | 29 (67.4) | 29 (69.0) | 15 (71.4) | 0.661/0.607 |
| ARB | 3 (10.7) | 3 (7.0) | 7 (16.7) | 4 (19.0) | 0.450/0.709 |
| Aldosterone Antagonist | 0 (0) | 3 (7.0) | 14 (33.3) | 8 (38.1) | 0.301/0.904 |
| Antiarrhythmic Drug | 0 (0) | 2 (4.7) | 4 (9.5) | 8 (38.1) | 0.021/0.052 |
| QRS Duration >120 ms- | 2 (7.1) | 8 (20.0) | 18 (43.9) | 15 (71.4) | 0.014/0.150 |
| no. (%) | | | | | |
| LVEF % | 54.6 ± 1.9 | 26.0 ± 7.7 | 27.4 ± 7.0 | 26.1 ± 5.5 | 0.414/0.382 |
| | | | | | (LVEF≦20%) |

ACE, angiotensin converting enzyme;
ARB, angiotensin receptor blocker;
LVEF, left ventricular ejection factor;;
NYHA Class, New York Heart Association class

[0500] Patients in the three HF groups had to be at least 18 years of age and have a reduced LVEF<35% documented in the last two years. Patients with an ICD in place, both with and without appropriate event therapy, had to have the device implanted for more than one year. Patients taking immunosuppressive medications, having a chronic infection, having an acute or chronic inflammatory illness that might alter WBC mRNA expression, having any illness expected to result in death within 18 months of enrollment, or currently using illicit drugs were excluded from this study. Control patients had to be free of HF symptoms, diastolic dysfunction, and left ventricular systolic dysfunction documented by any methodology within one year of study enrollment. Other exclusion criteria for the control group included Long-QT Syndrome, Brugada Syndrome, or a history of significant illness (i.e. myocardial infarction, cardiac hospitalization, cardiac arrhythmia, infection, or cancer) within 12 months of study enrollment.

[0501] Laboratory methods. Blood samples were collected in PAX tubes (Fisher Scientific, Pittsburgh, Pa.) following the manufacturer's procedure. Samples were stored for up to three days at room temperature or five days at 2-8° C. Total RNA was isolated using the PAXgene Blood RNA isolation kit and then converted to cDNA using the High Capacity cDNA Reverse Transcription Kit (Qiagen, Valencia, Calif.).

[0502] The heart tissue samples were obtained from residual cores removed after left ventricular assist device (LVAD) placement at our affiliate, Christ Advocate Hospital. Eligible patients were over 18 years of age, had a LVEF of <35% documented in the last year, and had a need for LVAD implantation. Paired blood samples were collected simultaneously from patients undergoing LVAD placement. Total RNA was isolated from WBCs and human heart tissue with the RNeasy Mini and RNeasy Lipid Tissue Mini Kits, respectively (Qiagen) and then converted to cDNA using the High Capacity cDNA Reverse Transcription Kit (Qiagen). Quantitative RT-PCR was done using iQ™ SYBR® Green Supermix. The primer sequences used were SCN5A (5′-TTACGCACCTTCCGAGTCCTCC-3′; 5′-GATGAGGGCAAAGACGCTGAGG-3′); HSCN5A E28C/Reverse (5′-TCTCTTCTCCCCTCCTGCTGGTCA-3′); HSCN5A E28D/Reverse (5′-GGAAGAGCGTCGGGGAGAAGAAGTA-3′). Quantitative reverse transcription polymerase chain reaction (qRT-PCR) thermal cycling conditions were an initial uracil-N-glycosylase incubation at 50° C. for two minutes. iTaq™ DNA polymerase was activated with an initial denaturation step at 95° C. for five minutes, followed by 40 cycles of denaturation at 95° C. for 15 seconds, and annealing and extension at 60° C. for one minute. Each sample was measured for the target gene SCN5A, VC, VD, and β-actin. Variants levels were expressed as a percentage of the variant with respect to the total Na+ channel mRNA (as measured using primers for Exon 28 Variant A+Exon 28 Variant B+Exon 28 Variant C (VC)+Exon 28 Variant D (VD)) to correct for differences in WBC SCN5A expression between subjects.

[0503] Statistical analysis. Age, sex, race, ischemia, LEVF, medications, New York Heart Association (NYHA) Class, and QRS duration measurements were recorded. Clinical characteristics were reported as means±standard deviations for continuous variables and frequencies for categorical variables. Differences between the groups were examined by t-tests and chi-square tests for continuous and categorical variables, respectively. Results with p<0.05 were considered statistically significant in all analyses.

[0504] Linear regression, based on ordinary least squares (OLS), was used to determine the degree of correlation between normalized variant levels in the ventricle and blood. A probability value P<0.05 was taken to indicate statistical correlation. The diagnostic odds ratio (DOR) is an overall measure of diagnostic accuracy that combines both sensitivity and specificity: [sensitivity/(1−sensitivity)]/[(1−specificity)/specificity]. We compared the summary DORs and their corresponding 95% confidence intervals (CIs) across different diagnostic predictors: normalized variants VC and VD in the blood, New York Heart Association (NYHA) class III/IV, ACE inhibitors, antiarrhythmic drugs, LVEF≦20%, and QRS duration≧120 ms. Univariate analysis was performed to calculate DORs and their corresponding 95% CIs.

[0505] Receiver Operating Characteristic (ROC) curves were generated for both splicing variants and LVEF≦20%. Sensitivity (the proportion of true positive ICD patients with an event) and the specificity (the proportion of ICD patients without an event) were evaluated. A commonly used measure of overall diagnostic effectiveness is the Youden index, defined as: (sensitivity+specificity)−1. We determined the optimal cutoff value that maximized the Youden index. The sensitivities and specificities were calculated from the data across all possible cutoff values within the range of the test results, and we selected the cutoff value leading to the highest Youden index.

[0506] The following is a description of the results of this example.

[0507] Correlation of cardiac tissue and blood abundances of VC and VD. In order to show that WBC SCN5A variants might be an acceptable surrogate for the physiologically relevant levels of variants in heart, we designed paired analysis of WBC and ventricular tissue variants from the same patient. A total 14 paired blood and heart tissue samples were collected. The correlation between blood and tissue variants levels is shown for VC and VD in FIGS. 35A and 35B, respectively. The coefficients of determination, r2, were 0.60 and 0.57 and the correlation coefficients, r, were 0.78 and 0.75 for variants VC and VD, respectively, demonstrating the high degree of correlation of tissue and blood SCN5A variants.

[0508] SCN5A variants were increased in participants with ICD events. Total WBCs were collected from control, HF, ICD(−)Event, and ICD(+)Event groups. The fold inductions of VC (FIG. 36A) and VD (FIG. 36B) in the HF, ICD(−)Event, and ICD(+)Event groups were compared to the control group. Medians and interquartile ranges (IQR) for VC in the three groups were HF 2.1 (IQR 1.7-2.5), ICD(−)Event 2.5 (IQR 2.1-3.1) and ICD(+)Event 7.3 (IQR 6.8-8.4) respectively. Medians and IQRs for VD were HF 2.8 (IQR 2.5-3.1), ICD(−)Event 1.7 (IQR 1.1-2.0) and ICD(+)Event 6.6 (IQR 6.3-7.8). The expressions of VC and VD were significantly increased in the HF, ICD(−)Event, ICD(+)Event groups when compared to the control group (p<0.05). Moreover, the expressions of VC and VD were significantly increased in the ICD(+)Event group when compared to the HF group or ICD(−) Event group (p<0.05).

[0509] The effect of population characteristics on the expression of the SCN5A variants. There was no difference in the expression of VC and VD between races (P>0.05; FIG. 37A-B), between sexes (P>0.05; FIG. 37C-D), between subjects with an ischemia history and those without an ischemia history (P>0.05; FIG. 37E-F), or between subjects with LVEF<20% and those with LVEF>20% (P>0.05; FIG. 37G-H). Worsening NYHA class was associated with an induction of SCN5A variants, however. The fold induction for NYHA Class I-II versus NYHA Class III-IV was 2.8±1.7 versus 4.1±2.7 and 2.5±1.6 versus 3.8±2.4 for VC and VD, respectively (P<0.05 for each; FIG. 371-J). The fold induction for QRS duration≦120 ms versus>120 ms was 3.0±2.1 versus 4.2±2.6 for VC (P<0.05; FIG. 37K). Although there was no statistically significant difference, a similar fold induction trend was noted for VD (P>0.05; FIG. 37L), where the fold induction for QRS duration<120 ms versus QRS duration>120 ms was 2.9±1.9 versus 3.6±2.4.

[0510] Predictors of ICD events. In FIG. 38, univariate analysis showed that NYHA class III/IV (DOR 7.65; 95% CI 2.17, 27.00), antiarrhythmic drug use (DOR 5.85; 95% CI 1.51, 22.70), VC (DOR 3.85; 95% CI 2.00, 7.43), VD (DOR 3.04; 95% CI 1.83, 5.05), and QRS duration≧120 ms (DOR 3.19; 95% CI 1.03, 9.89) were associated with increased risk of an ICD event. LVEF≦20% (DOR 2.11; 95% CI 0.22, 20.12) and ACE inhibitors (DOR 1.12; 95% CI 0.36, 3.54) were not associated with events.

[0511] Sensitivity and specificity of SCN5A variants for determination of ICD events. ROC curves were generated to evaluate the performance of the variants and LVEF≦20% in distinguishing between the ICD patients with and without the events. The area under the ROC curve was 0.98 (95% CI 0.95, 1.00), 0.97 (95% CI 0.93, 1.00) and 0.56 (95% CI 0.41, 0.71) for VC, VD and LVEF≦20%, respectively (FIG. 39). The values for the optimal Youden index and cutoff as well as the corresponding maximum sensitivities and specificities are shown in Table 3.

TABLE 3
Optimal discrimination values for VC and VD variants

| | Optimal | Optimal | | |
|---|---|---|---|---|
| | cutoff | Youden | Corresponding | Corresponding |
| Index test | value | index | sensitivity | specificity |
| Normalized VC | 4.2 | 0.9 | 1.0 | 0.9 |
| Normalized VD | 2.9 | 0.9 | 1.0 | 0.9 |
| LVEF ≦20% | 4.5 | 0.1 | 0.6 | 0.5 |

LVEF, Left ventricular ejection fraction;
VC, SCN5A variant C;
VD, SCN5A variant D

[0512] The following is a discussion of the results of this example.

[0513] Current screening methodologies are too expensive and have insufficient positive predictive power to be used effectively in larger population screening programs. Risk stratification for sudden cardiac death and the need for ICD placement is dependent upon assessment of LVEF. There are no blood tests approved for sudden death risk stratification. Other methods employed for risk stratification are signal averaged electrocardiogram (sensitivity 62.4% and specificity 77.4% at 2 years) (19) and T-wave alternans (sensitivity 74% and specificity 44% at 1 year) (20). Although these methods are sanctioned for risk prediction of sudden cardiac death, such techniques are not widely employed, given equipment and personnel costs to implement them and studies showing low sensitivities and specificities. Invasive electrophysiological testing has been used sparingly for the same reasons (sensitivity 62% and specificity 62% at 1 year) (19). In addition, while risk may change with time, these more demanding techniques, if used at all, are often restricted to a single assessment per patient. Therefore, there is an unmet need for convenient, inexpensive, effective sudden cardiac death risk assessment in the HF population.

[0514] It is known that reductions in sodium current, the main current for cardiac conduction can be arrhythmogenic. (15, 21) SCN5A, encoding the α-subunit of the Na+ channel, was cloned by in 1992 and mapped to the chromosomal region 3p21 in 1995 (22-24). Since SCN5A was cloned, hundreds of mutations have been found that cause inherited sudden death syndromes such as Brugada syndrome, the third variant of Long QT syndrome (LTQ3), and sudden infant death (25-27). Alterations in the Na+ current, either up or downregulation, lead to arrhythmias (28). Moreover, we have shown that abnormal SCN5A mRNA splicing results in SCN5A variants that can contribute to arrhythmic risk and that these variants are increased in HF (17, 18).

[0515] Using LVAD core samples and concurrently obtained blood samples on the same patient, we have shown that there is a significant degree of correlation between normalized variant levels in the heart and blood. The expression of WBC SCN5A variant abundances were compared in subjects with a graded risk of arrhythmias from controls to HF patients with ICD events. HF patients who had received appropriate ICD intervention had significantly higher levels of SCN5A splice variants compared to controls and to subjects who had not received an intervention. As expected HF subjects with and without an ICD but with no intervention had similar variant levels. The results indicated that SCN5A variants were significantly increased in a graded manner that reflected the increasing risk of sudden death between the groups. Moreover, the separation between groups allowed for sensitive and specific discrimination of patients with and without ICD events. This suggested that the amount of SCN5A variants in the blood might have prospective predictive power to determine HF-associated arrhythmic risk.

[0516] The ability of variants to discriminate between groups with and without ICD events was not affected by sex, race, origin of the myopathy, or LVEF value less than 35%. As expect for a process dependent on the severity of HF, SCN5A variants levels showed a significant increase in NYHA class III-IV as compared to less severe HF. Consistent with the expected reduction in cardiac conduction with a reduction in functional sodium channels, variants levels were higher in patients with longer QRS durations. Interestingly, variant levels did not correlate well with LVEF, suggesting that their measure may give added information to risk reflected by left ventricular function. Given the cardiac specific nature of the SCN5A variants and the high degree of sensitivity and specificity of the correlation between SCN5A variants levels and ICD interventions, it might be possible to use WBCs SCN5A variants as a supplement to current methods to improve discrimination of patients most likely to benefit from ICD implantation.

[0517] In conclusion, we have shown that cardiac SCN5A mRNA variants are present in myocardium and WBCs and that these levels in these two cell types correlate. Moreover, the SCN5A variants levels increased with risk for SCD, and variants levels were significantly elevated in subjects having received an ICD intervention. The degree of separation of variants levels between HF subjects with and without an ICD intervention suggested variant levels had a strong power to discriminate between these two groups. If true in prospective validation trials, WBC SCN5A variant level determinations may help identify which patients with HF might benefit most from device implantation.

[0518] The following references were cited in Example 16:

### REFERENCE LIST

[0519] 1. Roger V L, et al. Circulation 2011; 123:e18-e209.
[0520] 2. Kannel W B, et al. Am Heart J 1988; 115:869-75.
[0521] 3. Hunt S A, et al. ACC/AHA 2005 Circulation 2005; 112:e154-e235.
[0522] 4. Bardy G H, et al. N Engl J Med 2005; 352:225-37.
[0523] 5. LaPointe N M, et al. Circ Cardiovasc Qual Outcomes 2011; 4:146-51.
[0524] 6. Bilchick K C, et al., J Am Coll Cardiol 2012; 60:1647-55.
[0525] 7. Levy W C, Lee K L, Hellkamp A S, et al. Circulation 2009; 120:835-42.
[0526] 8. Goldenberg I, Vyas A K, Hall W J, et al. J Am Coll Cardiol 2008; 51:288-96.
[0527] 9. Huikuri H V, et al. Circulation 2003; 108:110-5.
[0528] 10. Modrek B, Lee C. Nat Genet. 2002; 30:13-9.
[0529] 11. Pan Q, et al. Nat Genet. 2008; 40:1413-5.
[0530] 12. Zhou A, et al. Mol Cell Biol 2008; 28:5924-36.
[0531] 13. Gao G, et al. Circulation 2011; 124:1124-31.
[0532] 14. Hu D, et al. Heart Rhythm 2011; 9:760-9.
[0533] 15. Abriel H, Kass R S. Trends Cardiovasc Med 2005; 15:35-40.
[0534] 16. Shang L L, et al. Circ Res 2007; 101:1146-54.
[0535] 17. Shang L L, et al. Circ Res 2007; 101:1146-54.
[0536] 18. Gao G, et al. Circulation 2011; 124:1124-31.
[0537] 19. Bailey J J, et al. J Am Coll Cardiol 2001; 38:1902-11.
[0538] 20. Costantini O, et al. J Am Coll Cardiol 2009; 53:471-9.
[0539] 21. Shibata E F, et al. J Cardiovasc Electrophysiol 2006; 17 Suppl 1:S34-S42.
[0540] 22. Gellens M E, et al. Proc Natl Acad Sci USA 1992; 89:554-8.
[0541] 23. George A L, Jr., et al. Cytogenet Cell Genet. 1995; 68:67-70.
[0542] 24. Kullmann D M. Brain 2002; 125:1177-95.
[0543] 25. Antzelevitch C. Pacing Clin Electrophysiol 2006; 29:1130-59.
[0544] 26. Chung S K, et al. Heart Rhythm 2007; 4:1306-14.
[0545] 27. Otagiri T, Kijima K, Osawa M, et al. Pediatr Res 2008; 64:482-7.
[0546] 28. Ruan Y, Liu N, Priori S G. Nat Rev Cardiol 2009; 6:337-48.

[0547] All references, including publications, patent applications, and patents, cited herein are hereby incorporated by reference to the same extent as if each reference were individually and specifically indicated to be incorporated by reference and were set forth in its entirety herein.

[0548] The use of the terms “a” and “an” and “the” and similar referents in the context of describing the invention (especially in the context of the following claims) are to be construed to cover both the singular and the plural, unless otherwise indicated herein or clearly contradicted by context. The terms “comprising,” “having,” “including,” and “containing” are to be construed as open-ended terms (i.e., meaning “including, but not limited to,”) unless otherwise noted.

[0549] Recitation of ranges of values herein are merely intended to serve as a shorthand method of referring individually to each separate value falling within the range and each endpoint, unless otherwise indicated herein, and each separate value and endpoint is incorporated into the specification as if it were individually recited herein.

[0550] All methods described herein can be performed in any suitable order unless otherwise indicated herein or otherwise clearly contradicted by context. The use of any and all examples, or exemplary language (e.g., “such as”) provided herein, is intended merely to better illuminate the invention and does not pose a limitation on the scope of the invention unless otherwise claimed. No language in the specification should be construed as indicating any non-claimed element as essential to the practice of the invention.

[0551] Preferred embodiments of this invention are described herein, including the best mode known to the inventors for carrying out the invention. Variations of those preferred embodiments may become apparent to those of ordinary skill in the art upon reading the foregoing description. The inventors expect skilled artisans to employ such variations as appropriate, and the inventors intend for the invention to be practiced otherwise than as specifically described herein. Accordingly, this invention includes all modifications and equivalents of the subject matter recited in the claims appended hereto as permitted by applicable law. Moreover, any combination of the above-described elements in all possible variations thereof is encompassed by the invention unless otherwise indicated herein or otherwise clearly contradicted by context.

What is claimed:

1. A method of determining a subject's need for an ICD, comprising the step of determining a ratio, R_{S}, which compares a level of a truncated SCN5A Exon 28 transcript of a biological sample obtained from a subject to (i) a level of a full length SCN5A Exon 28 transcript of the biological sample or (ii) a level of all SCN5A Exon 28 transcripts of the biological sample or (iii) a level of a full length SCN5A Exon 28 transcript and a level or one or more truncated SCN5A Exon 28 transcripts of the biological sample.

2. The method of claim 1, wherein the subject needs an ICD, when R_{S} is greater than or equal to a threshold ratio, R_{T}.

3. The method of claim 2, wherein R_{T} is a ratio which compares a level of a truncated SCN5A Exon 28 transcript of a biological sample obtained from a control subject to (i) a level of a full length SCN5A Exon 28 transcript of the biological sample obtained from the control subject or (ii) a level of all SCN5A Exon 28 transcripts of the biological sample obtained from the control subject or (iii) a level of a full length SCN5A Exon 28 transcript and a level or one or more truncated SCN5A Exon 28 transcripts of the biological sample obtained from the control subject, wherein the control subject is a subject known as (i) not having an ICD, (ii) not having a cardiac disease, (iii) having normal left ventricular function, (iv) not having diastolic dysfunction, or (v) a combination thereof.

4. The method of claim 2, wherein R_{T}=μ+4.0σ, wherein μ=is the mean value of a Gaussian distribution of a set of data values, wherein each data value of the set represents a ratio which compares a level of a truncated SCN5A Exon 28 transcript of a biological sample obtained from a control subject to (i) a level of a full length SCN5A Exon 28 transcript of the biological sample obtained from the control subject or (ii) a level of all SCN5A Exon 28 transcripts of the biological sample obtained from the control subject or (iii) a level of a full length SCN5A Exon 28 transcript and a level or one or more truncated SCN5A Exon 28 transcripts of the biological sample obtained from the control subject, wherein the control subject is a subject known as (i) not having an ICD, (ii) not having a cardiac disease, (iii) having normal left ventricular function, (iv) not having diastolic dysfunction, or (v) a combination thereof, and wherein σ is the standard deviation of the Gaussian distribution of the data values.

5. The method of claim 2, wherein R_{T} is a ratio which compares a level of a truncated SCN5A Exon 28 transcript of a biological sample obtained from a control subject to (i) a level of a full length SCN5A Exon 28 transcript of the biological sample obtained from the control subject or (ii) a level of all SCN5A Exon 28 transcripts of the biological sample obtained from the control subject or (iii) a level of a full length SCN5A Exon 28 transcript and a level or one or more truncated SCN5A Exon 28 transcripts of the biological sample obtained from the control subject, wherein the control subject is a subject known as having an ICD that has not given a shock to the control subject.

6. The method of claim 2, wherein R_{T}=μ+Xσ, wherein μ=is the mean value of a Gaussian distribution of a set of data values, wherein each data value of the set represents a ratio which compares a level of a truncated SCN5A Exon 28 transcript of a biological sample obtained from a control subject to (i) a level of a full length SCN5A Exon 28 transcript of the biological sample obtained from the control subject or (ii) a level of all SCN5A Exon 28 transcripts of the biological sample obtained from the control subject or (iii) a level of a full length SCN5A Exon 28 transcript and a level or one or more truncated SCN5A Exon 28 transcripts of the biological sample obtained from the control subject, wherein the control subject is a subject known as having an ICD that has not given a shock to the control subject, wherein σ is the standard deviation of the Gaussian distribution of the data values, and X is a number between 0.7 and 4.0.

7. The method of claim 2, wherein R_{T}=μ−Xσ, wherein μ=is the mean value of a Gaussian distribution of a set of data values, wherein each data value of the set represents a ratio wherein the control subject is a subject known as having an ICD that has not given a shock to the control subject, wherein the control subject is a subject known as having an ICD that has given a shock to the control subject, wherein σ is the standard deviation of the Gaussian distribution of the data values, and X is a number between 0.7 and 4.0.

8. The method of claim 7, wherein X is a number between about 0.7 and about 1.0.

9. The method of claim 7, wherein X is a number between about 2.0 and about 4.0.

10. The method of claim 9, wherein X is a number between about 2.326 and about 4.0.

11. The method of any one of the preceding claims, wherein: (A) when R_{S} is determined, (i) the level of the truncated SCN5A Exon 28 transcript of the biological sample or (ii) the level of the full length SCN5A Exon 28 transcript of the biological sample or (iii) the level of all SCN5A Exon 28 transcripts of the biological sample obtained from the subject are normalized to a level of a housekeeping gene of the biological sample obtained from the subject, (B) when R_{T} is determined, (i) the level of the truncated SCN5A Exon 28 transcript of the biological sample or (ii) the level of the full length SCN5A Exon 28 transcript of the biological sample or (iii) the level of all SCN5A Exon 28 transcripts of the biological sample obtained from the subject are normalized to a level of a housekeeping gene of the biological sample obtained from the control subject, or (C) both (A) and (B).

12. The method of claim 11, wherein the housekeeping gene is glyceraldehyde-3-phosphate dehydrogenase (GAPDH) or β-actin.

13. The method of any one of the preceding claims, wherein R_{S} is
$$\frac{Truncated SCN 5 A Exon 28 transcript}{Full length SCN 5 A Exon 28 transcript} = \frac{\begin{matrix}Calibrated abundance of \\ truncated SCN 5 A Exon 28 transcript\end{matrix}}{\begin{matrix}Calibrated abundance of full \\ length SCN 5 A Exon 28 transcript\end{matrix}}$$
wherein:
calibrated abundance of truncated SCN5A Exon 28 transcript=2^{-ΔΔCttruncated SCN5A Exon 28 transcript}
calibrated abundance of full length SCN5A Exon 28 transcript=2^{-ΔΔCtfull length SCN5A Exon 28 transcript}
ΔΔCt_{full length SCN5A Exon 28 transcript}=ΔCt_{full length}−ΔCt_{housekeeping gene}
ΔΔCt_{truncated SCN5A Exon 28 transcript}=ΔCt_{truncated}−ΔCt_{housekeeping gene}
ΔCt_{full length}=([Ct of full length SCN5A Exon 28 transcript of subject sample]−[Ct of full length SCN5A Exon 28 transcript of control sample])
ΔCt_{truncated}=([Ct of truncated SCN5A Exon 28 transcript of subject sample]−[Ct of truncated SCN5A Exon 28 transcript of control sample])
ΔCt_{housekeeping gene}=([Ct of housekeeping gene of subject sample]−[Ct of housekeeping gene of control sample])
wherein “subject sample” is a biological sample obtained from the subject and “control sample” is a biological sample obtained from a control subject known as (i) not having an ICD, (ii) not having a cardiac disease, (iii) having normal left ventricular function, (iv) not having diastolic dysfunction, or (v) a combination thereof, wherein “full length” refers to WT SCN5A Exon 28 transcripts or E28A-S transcripts or both WT SCN5A Exon 28 transcripts and E28A-S transcripts;
or R_{S} is
$$\frac{Truncated SCN 5 A Exon 28 transcript}{All SCN 5 A Exon 28 transcripts} = \frac{\begin{matrix}Calibrated abundance of \\ truncated SCN 5 A Exon 28 transcript\end{matrix}}{\begin{matrix}Calibrated abundance of all \\ SCN 5 A Exon 28 transcripts\end{matrix}}$$
wherein:
calibrated abundance of truncated SCN5A Exon 28 transcript=2^{-ΔΔCttruncated SCN5A Exon 28 transcript}
calibrated abundance of all SCN5A Exon 28 transcripts=2^{-ΔΔCtall SCN5A Exon 28 transcripts}
ΔΔCt_{all SCN5A Exon 28 transcripts}=ΔCt_{all SCN5A Exon 28 transcripts}−ΔCt_{housekeeping gene}
ΔΔCt_{truncated SCN5A Exon 28 transcript}=ΔCt_{truncated}−ΔCt_{housekeeping gene}
ΔCt_{all SCN5A Exon 28 transcripts}=([Ct of all SCN5A Exon 28 transcripts of subject sample]−[Ct of all SCN5A Exon 28 transcripts of control sample])
ΔCt_{truncated}=([Ct of truncated SCN5A Exon 28 transcript of subject sample]−[Ct of truncated SCN5A Exon 28 transcript of control sample])
ΔCt_{housekeeping gene}=([Ct of housekeeping gene of subject sample]−[Ct of housekeeping gene of control sample])
wherein “subject sample” is a biological sample obtained from the subject and “control sample” is a biological sample obtained from a control subject known as (i) not having an ICD, (ii) not having a cardiac disease, (iii) having normal left ventricular function, (iv) not having diastolic dysfunction, or (v) a combination thereof, wherein “all SCN5A Exon 28 transcripts” refers to all of WT, E28A-S, E28B, E28C, and E28D.

14. The method of any one of claims 6 and 11-13, wherein, when R_{T}=μ+Xσ, the ratio of the biological sample obtained from the
$$\begin{matrix}control subject = \frac{Truncated SCN 5 A Exon 28 transcipt}{Full length SCN 5 A Exon 28 transcript} \\ = \frac{\begin{matrix}Calibrated abundance of truncated \\ SCN 5 A Exon 28 transcript\end{matrix}}{\begin{matrix}Calibrated abundance of full length \\ SCN 5 A Exon 28 transcirpt\end{matrix}}\end{matrix}$$
wherein:
calibrated abundance of truncated SCN5A Exon 28 transcript=2^{-ΔΔCttruncated SCN5A Exon 28 transcript}
calibrated abundance of full length SCN5A Exon 28 transcript=2^{-ΔΔCtfull length SCN5A Exon 28 transcript}
ΔΔCt_{full length SCN5A Exon 28 transcript}=ΔCt_{full length}−ΔCt_{housekeeping gene}
ΔΔCt_{truncated SCN5A Exon 28 transcript}=ΔCt_{truncated}−ΔCt_{housekeeping gene}
ΔCt_{full length}=([Ct of full length SCN5A Exon 28 transcript of ICD patient (−) shock]−[Ct of full length SCN5A Exon 28 transcript of control sample])
ΔCt_{truncated}=([Ct of truncated SCN5A Exon 28 transcript of ICD patient (−) shock]−[Ct of truncated SCN5A Exon 28 transcript of control sample])
ΔCt_{housekeeping gene}=([Ct of housekeeping gene of ICD patient (−) shock]−[Ct of housekeeping gene of control sample]).
wherein “ICD patient (−) shock” is a biological sample obtained from a subject known as having an ICD that has not given a shock and “control sample” is a biological sample obtained from a control subject known as (i) not having an ICD, (ii) not having a cardiac disease, (iii) having normal left ventricular function, (iv) not having diastolic dysfunction, or (v) a combination thereof, wherein “full length” refers to WT SCN5A Exon 28 transcripts or E28A-S transcripts or both WT SCN5A Exon 28 transcripts and E28A-S transcripts. or wherein, when R_{T}=μ+Xσ, the ratio of the biological sample obtained from the
$$\begin{matrix}control subject = \frac{Truncated SCN 5 A Exon 28 transcript}{All SCN 5 A Exon 28 transcripts} \\ = \frac{\begin{matrix}Calibrated abundance of truncated \\ SCN 5 A Exon 28 transcript\end{matrix}}{\begin{matrix}Calibrated abundance of all \\ SCN 5 A Exon 28 transcripts\end{matrix}}\end{matrix}$$
wherein:
calibrated abundance of truncated SCN5A Exon 28 transcript=2^{-ΔΔCttruncated SCN5A Exon 28 transcript}
calibrated abundance of all SCN5A Exon 28 transcripts=2^{-ΔΔCtall SCN5A Exon 28 transcripts}
ΔΔCt_{all SCN5A Exon 28 transcripts}=ΔCt_{all SCN5A Exon 28 transcripts}−ΔCt_{housekeeping gene}
ΔΔCt_{truncated SCN5A Exon 28 transcript}=ΔCt_{truncated}−ΔCt_{housekeeping gene}
ΔCt_{all SCN5A Exon 28 transcripts}=([Ct of all SCN5A Exon 28 transcripts of ICD patient (−) shock]−[Ct of all SCN5A Exon 28 transcripts of control sample])
ΔCt_{truncated}=([Ct of truncated SCN5A Exon 28 transcript of ICD patient (−) shock]−[Ct of truncated SCN5A Exon 28 transcript of control sample])
ΔCt_{housekeeping gene}=([Ct of housekeeping gene of ICD patient (−) shock]−[Ct of housekeeping gene of control sample])
wherein “ICD patient (−) shock” is a biological sample obtained from a subject known as having an ICD that has not given a shock and “control sample” is a biological sample obtained from a control subject known as (i) not having an ICD, (ii) not having a cardiac disease, (iii) having normal left ventricular function, (iv) not having diastolic dysfunction, or (v) a combination thereof, wherein “all SCN5A Exon 28 transcripts” refers to all of WT, E28A-S, E28B, E28C, and E28D.

15. The method of any one of claims 7-13, wherein, when R_{T}=μ−Xσ, the ratio of the biological sample obtained from the control subject is
$$\frac{Truncated SCN 5 A Exon 28 transcript}{Full length SCN 5 A Exon 28 transcript} = \frac{\begin{matrix}Calibrated abudance of truncated \\ SCN 5 A Exon 28 transcript\end{matrix}}{\begin{matrix}Calibrated abundance of full \\ length SCN 5 A Exon 28 transcript\end{matrix}}$$
wherein:
calibrated abundance of truncated SCN5A Exon 28 transcript=2^{-ΔΔCttruncated SCN5A Exon 28 transcript}
calibrated abundance of full length SCN5A Exon 28 transcript=2^{-ΔΔCtfull length SCN5A Exon 28 transcript}
ΔΔCt_{full length SCN5A Exon 28 transcript}=ΔCt_{full length}−ΔCt_{housekeeping gene}
ΔΔCt_{truncated SCN5A Exon 28 transcript}=ΔCt_{truncated}−ΔCt_{housekeeping gene}
ΔCt_{full length}=([Ct of full length SCN5A Exon 28 transcript of ICD patient (+) shock]−[Ct of full length SCN5A Exon 28 transcript of control sample])
ΔCt_{truncated}=([Ct of truncated SCN5A Exon 28 transcript of ICD patient (+) shock]−[Ct of truncated SCN5A Exon 28 transcript of control sample])
ΔCt_{housekeeping gene}=([Ct of housekeeping gene of ICD patient (+) shock]−[Ct of housekeeping gene of control sample]).
wherein “ICD patient (+) shock” is a biological sample obtained from a subject known as having an ICD that has given a shock and “control sample” is a biological sample obtained from a control subject known as (i) not having an ICD, (ii) not having a cardiac disease, (iii) having normal left ventricular function, (iv) not having diastolic dysfunction, or (v) a combination thereof, wherein “full length” refers to WT SCN5A Exon 28 transcripts or E28A-S transcripts or both WT SCN5A Exon 28 transcripts and E28A-S transcripts; or when R_{T}=μ−Xσ, the ratio of the biological sample obtained from the control subject is
$$\frac{Truncated SCN 5 A Exon 28 transcript}{All SCN 5 A Exon 28 transcripts} = \frac{Calibrated abudance of truncated SCN 5 A Exon 28 transcript}{Calibrated abundance of all SCN 5 A Exon 28 transcripts}$$
wherein:
calibrated abundance of truncated SCN5A Exon 28 transcript=2^{-ΔΔCttruncated SCN5A Exon 28 transcript}
calibrated abundance of all SCN5A Exon 28 transcripts=2^{-ΔΔCtall SCN5A Exon 28 transcripts}
ΔΔCt_{all SCN5A Exon 28 transcripts}=ΔCt_{all SCN5A Exon 28 transcripts}−ΔCt_{housekeeping gene}
ΔΔCt_{truncated SCN5A Exon 28 transcript}=ΔCt_{truncated}−ΔCt_{housekeeping gene}
ΔCt_{all SCN5A Exon 28 transcripts}=([Ct of all SCN5A Exon 28 transcripts of ICD patient (+) shock]−[Ct of all SCN5A Exon 28 transcripts of control sample])
ΔCt_{truncated}=([Ct of truncated SCN5A Exon 28 transcript of ICD patient (+) shock]−[Ct of truncated SCN5A Exon 28 transcript of control sample])
ΔCt_{housekeeping gene}=([Ct of housekeeping gene of ICD patient (+) shock]−[Ct of housekeeping gene of control sample])
wherein “ICD patient (+) shock” is a biological sample obtained from a subject known as having an ICD that has given a shock and “control sample” is a biological sample obtained from a control subject known as (i) not having an ICD, (ii) not having a cardiac disease, (iii) having normal left ventricular function, (iv) not having diastolic dysfunction, or (v) a combination thereof, wherein “all SCN5A Exon 28 transcripts” refers to all of WT, E28A-S, E28B, E28C, and E28D.

16. The method of any one of claims 13 to 15, wherein each mRNA level is determined via Real Time-Polymerase Chain Reaction (R_{T}-PCR).

17. The method of any one of the preceding claims, wherein the level of the truncated SCN5A Exon 28 transcript is a level of SCN5A Exon 28 Splice Variant C (E28C) or a level of SCN5A Exon 28 Splice Variant D (E28D).

18. The method of claim 17, wherein the level of a truncated SCN5A Exon 28 transcript is a level of E28C and E28D.

19. The method of any one of the preceding claims, wherein the level of the truncated SCN5A Exon 28 transcript is compared to (i) a level of WT SCN5A Exon 28 transcripts, (ii) a level of E28A-S, or (iii) a combination of (i) and (ii).

20. The method of any one of the preceding claims, wherein the level of the truncated SCN5A Exon 28 transcript is compared to a level of all of WT SCN5A Exon 28 transcripts, E28A-S, E28B, E28C, and E28D.

21. The method of any one of the preceding claims, wherein the level of the truncated SCN5A Exon 28 transcript is compared to a level of (A) and (B), wherein:
(A) is one of (i) a level of WT SCN5A Exon 28 transcripts, (ii) a level of E28A-S, or (iii) a combination of (i) and (ii), and
(B) is one or more of E28B, E28C, and E28D.

22. The method of claim 19 or 20, wherein the truncated SCN5A Exon 28 transcript is E28C.

23. The method of claim 22, wherein
$${R}_{S} = {R}_{E 28 C} = \frac{Calibrated abundance of E 28 C transcript}{\begin{matrix}Calibrated abundance of a \\ full length SCN 5 A Exon 28 transcript\end{matrix}}$$
wherein:
calibrated abundance of E28C transcript=2^{-ΔΔCtE28C transcript}
calibrated abundance of full length SCN5A Exon 28 transcript=2^{-ΔΔCtfull length SCN5A Exon 28 transcript}
ΔΔCt_{full length SCN5A Exon 28 transcript}=ΔCt_{full length}−ΔCt_{housekeeping gene}
ΔΔCt_{E28C transcript}=ΔCt_{E28C transcript}−ΔCt_{housekeeping gene}
ΔCt_{full length}=([Ct of full length SCN5A Exon 28 transcript of subject sample]−[Ct of full length SCN5A Exon 28 transcript of control sample])
ΔCt_{E28C}=([Ct of E28C transcript of subject sample]−[Ct of E28C transcript of control sample])
ΔCt_{housekeeping gene}=([Ct of housekeeping gene of subject sample]−[Ct of housekeeping gene of control sample])
wherein “subject sample” is a biological sample obtained from the subject and “control sample” is a biological sample obtained from a control subject known as (i) not having an ICD, (ii) not having a cardiac disease, (iii) having normal left ventricular function, (iv) not having diastolic dysfunction, or (v) a combination thereof, wherein “full length” refers to WT SCN5A Exon 28 transcripts or E28A-S transcripts or both WT SCN5A Exon 28 transcripts and E28A-S transcripts;
or wherein
$${R}_{E 28 C} = \frac{Calibrated abundance of E 28 C transcript}{Calibrated abundance of all SCN 5 A Exon 28 transcripts}$$
wherein:
calibrated abundance of E28C transcript=2^{-ΔΔCtE28C transcript}
calibrated abundance of all SCN5A Exon 28 transcripts=2^{-ΔΔCtall SCN5A Exon 28 transcripts}
ΔΔCt_{all SCN5A Exon 28 transcripts}=ΔCt_{all SCN5A Exon 28 transcripts}−ΔCt_{housekeeping gene}
ΔΔCt_{E28C transcript}=ΔCt_{E28C transcript}−ΔCt_{housekeeping gene}
ΔCt_{all SCN5A Exon 28 transcripts}=([Ct of all SCN5A Exon 28 transcripts of subject sample]−[Ct of all SCN5A Exon 28 transcripts of control sample])
ΔCt_{E28C}=([Ct of E28C transcript of subject sample]−[Ct of E28C transcript of control sample])
ΔCt_{housekeeping gene}=([Ct of housekeeping gene of subject sample]−[Ct of housekeeping gene of control sample])
wherein “subject sample” is a biological sample obtained from the subject and “control sample” is a biological sample obtained from a control subject known as (i) not having an ICD, (ii) not having a cardiac disease, (iii) having normal left ventricular function, (iv) not having diastolic dysfunction, or (v) a combination thereof, wherein “all SCN5A Exon 28 transcripts” refers to all of WT, E28A-S, E28B, E28C, and E28D.

24. The method of claim 19 or 21, wherein truncated SCN5A Exon 28 transcript is E28D.

25. The method of claim 24, wherein
$${R}_{S} = {R}_{E 28 D} = \frac{Calibrated abundance of E 28 D transcript}{\begin{matrix}Calibrated abundance of full \\ length SCN 5 A Exon 28 transcript\end{matrix}}$$
wherein:
calibrated abundance of E28D transcript=2^{-ΔΔCtE28D transcript}
calibrated abundance of full length SCN5A Exon 28 transcript=2^{-ΔΔCtfull length SCN5A Exon 28 transcript}
ΔΔCt_{full length SCN5A Exon 28 transcript}=ΔCt_{full length}−ΔCt_{housekeeping gene}
ΔΔCt_{E28D transcript}=ΔCt_{E28D transcript}−ΔCt_{housekeeping gene}
ΔCt_{full length}=([Ct of full length SCN5A Exon 28 transcript of subject sample]−[Ct of full length SCN5A Exon 28 transcript of control sample])
ΔCt_{E28D}=([Ct of E28D transcript of subject sample]−[Ct of E28D transcript of control sample])
ΔCt_{housekeeping gene}=([Ct of housekeeping gene of subject sample]−[Ct of housekeeping gene of control sample])
wherein “subject sample” is a biological sample obtained from the subject and “control sample” is a biological sample obtained from a control subject known as (i) not having an ICD, (ii) not having a cardiac disease, (iii) having normal left ventricular function, (iv) not having diastolic dysfunction, or (v) a combination thereof, wherein “full length” refers to WT SCN5A Exon 28 transcripts or E28A-S transcripts or both WT SCN5A Exon 28 transcripts and E28A-S transcripts,
or wherein
$${R}_{E 28 D} = \frac{Calibrated abundance of E 28 D transcript}{Calibrated abundance of all SCN 5 A Exon 28 transcripts}$$
wherein:
calibrated abundance of E28D transcript=2^{-ΔΔCtE28D transcript}
calibrated abundance of all SCN5A Exon 28 transcripts=2^{-ΔΔCtall SCN5A Exon 28 transcripts}
ΔΔCt_{all SCN5A Exon 28 transcripts}=ΔCt_{all SCN5A Exon 28 transcripts}−ΔCt_{housekeeping gene}
ΔΔCt_{E28D transcript}=ΔCt_{E28D transcript}−ΔCt_{housekeeping gene}
ΔCt_{all SCN5A Exon 28 transcripts}=([Ct of all SCN5A Exon 28 transcripts of subject sample]−[Ct of all SCN5A Exon 28 transcripts of control sample])
ΔCt_{E28D}=([Ct of E28D transcript of subject sample]−[Ct of E28D transcript of control sample])
ΔCt_{housekeeping gene}=([Ct of housekeeping gene of subject sample]−[Ct of housekeeping gene of control sample])
wherein “subject sample” is a biological sample obtained from the subject and “control sample” is a biological sample obtained from a control subject known as (i) not having an ICD, (ii) not having a cardiac disease, (iii) having normal left ventricular function, (iv) not having diastolic dysfunction, or (v) a combination thereof, wherein “all SCN5A Exon 28 transcripts” refers to all of WT, E28A-S, E28B, E28C, and E28D.

26. The method of any one of claims 22 to 25, comprising determining a first R_{S} and a second R_{S}, wherein the first R_{S} compares a level of E28C to the level of all SCN5A Exon 28 transcripts and the second R_{S} compares a level of E28D to the level of all SCN5A Exon 28 transcripts.

27. The method of claim 26, wherein the first R_{S} is RE28C and the second R_{S} is E28D.

28. A method of determining a subject's need for an implanted cardiac defibrillator (ICD), comprising the steps of:
(A) determining a ratio, Rₛ, which compares a level of a truncated SCN5A Exon 28 transcript of a biological sample of a subject to (i) a level of a full length SCN5A Exon 28 transcript of the biological sample or (ii) a level of all SCN5A Exon 28 transcripts of the biological sample or (iii) a level of a full length SCN5A Exon 28 transcript and a level or one or more truncated SCN5A Exon 28 transcripts of the biological sample, and
(B) comparing R_{S} as determined in (A) to a threshold ratio, R_{T}, wherein the R_{T} is determined by the system of any one of claims 97-108.

29. The method of claim 28, wherein the subject needs an ICD, when Rs is greater than or equal to the R_{T}.

30. A method of determining a subject's risk for sudden cardiac death (SCD), comprising the step of determining a ratio, Rₛ, which compares a level of a truncated SCN5A Exon 28 transcript of a biological sample obtained from a subject to (i) a level of a full length SCN5A Exon 28 transcript of the biological sample or (ii) a level of all SCN5A Exon 28 transcripts of the biological sample or (iii) a level of a full length SCN5A Exon 28 transcript and a level or one or more truncated SCN5A Exon 28 transcripts of the biological sample.

31. The method of claim 30, wherein the subject is at risk for SCD, when Rs is greater than or equal to a threshold ratio, R_{T}.

32. A method of determining a subject's need for an anti-arrhythmic therapy, comprising the step of determining a ratio, Rₛ, which compares a level of a truncated SCN5A Exon 28 transcript of a biological sample obtained from a subject to (i) a level of a full length SCN5A Exon 28 transcript of the biological sample or (ii) a level of all SCN5A Exon 28 transcripts of the biological sample or (iii) a level of a full length SCN5A Exon 28 transcript and a level or one or more truncated SCN5A Exon 28 transcripts of the biological sample.

33. The method of claim 32, wherein the subject needs an anti-arrhythmic therapy when Rs is greater than or equal to a threshold ratio, R_{T}.

34. The method of claim 32 or 33, wherein the anti-arrhythmic agent is a Singh Vaughan Williams Class IA, IB, IC, or III anti-arrhythmic agent.

35. The method of claim 32 or 33, wherein the Singh Vaughan Williams Class IA anti-arrhythmic agent is Quinidine, Procainamide, or Disopyramide.

36. The method of claim 32 or 33, wherein the Singh Vaughan Williams Class IB anti-arrhythmic agent is Lidocaine, Phenyloin, Mexiletine, or Tocamide.

37. The method of claim 32 or 33, wherein the Singh Vaughan Williams Class IC anti-arrhythmic agent is Flecamide, Propafenone, Moricizine, or Encamide.

38. The method of claim 32 or 33, wherein the Singh Vaughan Williams Class III anti-arrhythmic agent is Dronedarone, Amiodarone, or Ibutilide.

39. The method of claim 32 or 33, wherein the anti-arrhythmic agent is NAD+ or mitoTEMPO.

40. A method of reducing risk of sudden cardiac death (SCD) in a subject, comprising the step of the steps of
(a) determining a ratio, Rs, which compares a level of a truncated SCN5A Exon 28 transcript to (i) a level of a full length SCN5A Exon 28 transcript or (ii) a level of all SCN5A Exon 28 transcripts, of a biological sample obtained from the subject,
(b) implanting in the subject an ICD, when Rs is increased relative to a threshold ratio, R_{T}.

41. The method of any one of claims 31, and 33-40, wherein R_{T} is a ratio which compares a level of a truncated SCN5A Exon 28 transcript of a biological sample obtained from a control subject to (i) a level of a full length SCN5A Exon 28 transcript of the biological sample obtained from the control subject or (ii) a level of all SCN5A Exon 28 transcripts of the biological sample obtained from the control subject or (iii) a level of a full length SCN5A Exon 28 transcript and a level or one or more truncated SCN5A Exon 28 transcripts of the biological sample obtained from the control subject, wherein the control subject is a subject known as (i) not having an ICD, (ii) not having a cardiac disease, (iii) having normal left ventricular function, (iv) not having diastolic dysfunction, or (v) a combination thereof.

42. The method of any one of claims 31, and 33-40, wherein R_{T}=μ+4.0σ, wherein μ=is the mean value of a Gaussian distribution of a set of data values, wherein each data value of the set represents a ratio which compares a level of a truncated SCN5A Exon 28 transcript of a biological sample obtained from a control subject to (i) a level of a full length SCN5A Exon 28 transcript of the biological sample obtained from the control subject or (ii) a level of all SCN5A Exon 28 transcripts of the biological sample obtained from the control subject or (iii) a level of a full length SCN5A Exon 28 transcript and a level or one or more truncated SCN5A Exon 28 transcripts of the biological sample obtained from the control subject, wherein the control subject is a subject known as (i) not having an ICD, (ii) not having a cardiac disease, (iii) having normal left ventricular function, (iv) not having diastolic dysfunction, or (v) a combination thereof, and wherein a is the standard deviation of the Gaussian distribution of the data values.

43. The method of any one of claims 31, and 33-40, wherein R_{T} is a ratio which compares a level of a truncated SCN5A Exon 28 transcript of a biological sample obtained from a control subject to (i) a level of a full length SCN5A Exon 28 transcript of the biological sample obtained from the control subject or (ii) a level of all SCN5A Exon 28 transcripts of the biological sample obtained from the control subject or (iii) a level of a full length SCN5A Exon 28 transcript and a level or one or more truncated SCN5A Exon 28 transcripts of the biological sample obtained from the control subject, wherein the control subject is a subject known as having an ICD that has not given a shock to the control subject.

44. The method of any one of claims 31, and 33-40, wherein R_{T}=μ+Xσ, wherein μ=is the mean value of a Gaussian distribution of a set of data values, wherein each data value of the set represents a ratio which compares a level of a truncated SCN5A Exon 28 transcript of a biological sample obtained from a control subject to (i) a level of a full length SCN5A Exon 28 transcript of the biological sample obtained from the control subject or (ii) a level of all SCN5A Exon 28 transcripts of the biological sample obtained from the control subject or (iii) a level of a full length SCN5A Exon 28 transcript and a level or one or more truncated SCN5A Exon 28 transcripts of the biological sample obtained from the control subject, wherein the control subject is a subject known as having an ICD that has not given a shock to the control subject, wherein σ is the standard deviation of the Gaussian distribution of the data values, and X is a number between 0.7 and 4.0.

45. The method of any one of claims 31, and 33-40, wherein R_{T}=μ−Xσ, wherein μ=is the mean value of a Gaussian distribution of a set of data values, wherein each data value of the set represents a ratio wherein the control subject is a subject known as having an ICD that has not given a shock to the control subject, wherein the control subject is a subject known as having an ICD that has given a shock to the control subject, wherein σ is the standard deviation of the Gaussian distribution of the data values, and X is a number between 0.7 and 4.0.

46. The method of claim 45, wherein X is a number between about 0.7 and about 1.0.

47. The method of claim 45, wherein X is a number between about 2.0 and about 4.0.

48. The method of claim 47, wherein X is a number between about 2.326 and about 4.0.

49. The method of any one of claims 30 to 48, wherein: (A) when R_{S} is determined, (i) the level of the truncated SCN5A Exon 28 transcript of the biological sample or (ii) the level of the full length SCN5A Exon 28 transcript of the biological sample or (iii) the level of all SCN5A Exon 28 transcripts of the biological sample obtained from the subject are normalized to a level of a housekeeping gene of the biological sample obtained from the subject, (B) when R_{T} is determined, (i) the level of the truncated SCN5A Exon 28 transcript of the biological sample or (ii) the level of the full length SCN5A Exon 28 transcript of the biological sample or (iii) the level of all SCN5A Exon 28 transcripts of the biological sample obtained from the subject are normalized to a level of a housekeeping gene of the biological sample obtained from the control subject, or (C) both (A) and (B).

50. The method of claim 49, wherein the housekeeping gene is glyceraldehyde-3-phosphate dehydrogenase (GAPDH) or β-actin.

51. The method of any one of claims 28 to 50, wherein R_{S} is
$$\frac{Truncated SCN 5 A Exon 28 transcript}{Full length SCN 5 A Exon 28 transcript} = \frac{\begin{matrix}Calibrated abundance of \\ truncated SCN 5 A Exon 28 transcript\end{matrix}}{\begin{matrix}Calibrated abundance of \\ full length SCN 5 A Exon 28 transcipt\end{matrix}}$$
wherein:
calibrated abundance of truncated SCN5A Exon 28 transcript=2^{-ΔΔCttruncated SCN5A Exon 28 transcript}
calibrated abundance of full length SCN5A Exon 28 transcript=2^{-ΔΔCtfull length SCN5A Exon 28 transcript}
ΔΔCt_{full length SCN5A Exon 28 transcript}=ΔCt_{full length}−ΔCt_{housekeeping gene}
ΔΔCt_{truncated SCN5A Exon 28 transcript}=ΔCt_{truncated}−ΔCt_{housekeeping gene}
ΔCt_{full length}=([Ct of full length SCN5A Exon 28 transcript of subject sample]−[Ct of full length SCN5A Exon 28 transcript of control sample])
ΔCt_{truncated}=([Ct of truncated SCN5A Exon 28 transcript of subject sample]−[Ct of truncated SCN5A Exon 28 transcript of control sample])
ΔCt_{housekeeping gene}=([Ct of housekeeping gene of subject sample]−[Ct of housekeeping gene of control sample])
wherein “subject sample” is a biological sample obtained from the subject and “control sample” is a biological sample obtained from a control subject known as (i) not having an ICD, (ii) not having a cardiac disease, (iii) having normal left ventricular function, (iv) not having diastolic dysfunction, or (v) a combination thereof, wherein “full length” refers to WT SCN5A Exon 28 transcripts or E28A-S transcripts or both WT SCN5A Exon 28 transcripts and E28A-S transcripts;
or R_{S} is
$$\frac{Truncated SCN 5 A Exon 28 transcript}{All SCN 5 A Exon 28 transcripts} = \frac{Calibrated abundance of truncated SCN 5 A Exon 28 transcript}{Calibrated abundance of all SCN 5 A Exon 28 transcipts}$$
wherein:
calibrated abundance of truncated SCN5A Exon 28 transcript=2^{-ΔΔCttruncated SCN5A Exon 28 transcript}
calibrated abundance of all SCN5A Exon 28 transcripts=2^{-ΔΔCtall SCN5A Exon 28 transcripts}
ΔΔCt_{all SCN5A Exon 28 transcripts}=ΔCt_{all SCN5A Exon 28 transcripts}−ΔCt_{housekeeping gene}
ΔΔCt_{truncated SCN5A Exon 28 transcript}=ΔCt_{truncated}−ΔCt_{housekeeping gene}
ΔCt_{all SCN5A Exon 28 transcripts}=([Ct of all SCN5A Exon 28 transcripts of subject sample]−[Ct of all SCN5A Exon 28 transcripts of control sample])
ΔCt_{truncated}=([Ct of truncated SCN5A Exon 28 transcript of subject sample]−[Ct of truncated SCN5A Exon 28 transcript of control sample])
ΔCt_{housekeeping gene}=([Ct of housekeeping gene of subject sample]−[Ct of housekeeping gene of control sample])
wherein “subject sample” is a biological sample obtained from the subject and “control sample” is a biological sample obtained from a control subject known as (i) not having an ICD, (ii) not having a cardiac disease, (iii) having normal left ventricular function, (iv) not having diastolic dysfunction, or (v) a combination thereof, wherein “all SCN5A Exon 28 transcripts” refers to all of WT, E28A-S, E28B, E28C, and E28D.

52. The method of any one of claims 44 and 49-51, wherein, when R_{T}=μ+Xσ, the ratio of the biological sample obtained from the
$$control subject = \frac{Truncated SCN 5 A Exon 28 transcript}{Full length SCN 5 A Exon 28 transcript} = \frac{Calibrated abundance of truncated SCN 5 A Exon 28 transcript}{\begin{matrix}Calibrated abundance of full \\ length SCN 5 A Exon 28 transcript\end{matrix}}$$
wherein:
calibrated abundance of truncated SCN5A Exon 28 transcript=2^{-ΔΔCttruncated SCN5A Exon 28 transcript}
calibrated abundance of full length SCN5A Exon 28 transcript=2^{-ΔΔCtfull length SCN5A Exon 28 transcript}
ΔΔCt_{full length SCN5A Exon 28 transcript}=ΔCt_{full length}−ΔCt_{housekeeping gene}
ΔΔCt_{truncated SCN5A Exon 28 transcript}=ΔCt_{truncated}−ΔCt_{housekeeping gene}
ΔCt_{full length}=([Ct of full length SCN5A Exon 28 transcript of ICD patient (−) shock]−[Ct of full length SCN5A Exon 28 transcript of control sample])
ΔCt_{truncated}=([Ct of truncated SCN5A Exon 28 transcript of ICD patient (−) shock]−[Ct of truncated SCN5A Exon 28 transcript of control sample])
ΔCt_{housekeeping gene}=([Ct of housekeeping gene of ICD patient (−) shock]−[Ct of housekeeping gene of control sample]).
wherein “ICD patient (−) shock” is a biological sample obtained from a subject known as having an ICD that has not given a shock and “control sample” is a biological sample obtained from a control subject known as (i) not having an ICD, (ii) not having a cardiac disease, (iii) having normal left ventricular function, (iv) not having diastolic dysfunction, or (v) a combination thereof, wherein “full length” refers to WT SCN5A Exon 28 transcripts or E28A-S transcripts or both WT SCN5A Exon 28 transcripts and E28A-S transcripts. or wherein, when R_{T}=μ+Xσ, the ratio of the biological sample obtained from the
$$control subject = \frac{Truncated SCN 5 A Exon 28 transcript}{All Exon 28 transcripts} = \frac{\begin{matrix}Calibrated abundance of \\ truncated SCN 5 A Exon 28 transcript\end{matrix}}{\begin{matrix}Calibrated abundance of all \\ SCN 5 A Exon 28 transcripts\end{matrix}}$$
wherein:
calibrated abundance of truncated SCN5A Exon 28 transcript=2^{-ΔΔCttruncated SCN5A Exon 28 transcript}
calibrated abundance of all SCN5A Exon 28 transcripts=2^{-ΔΔCtall SCN5A Exon 28 transcripts}
ΔΔCt_{all SCN5A Exon 28 transcripts}=ΔCt_{all SCN5A Exon 28 transcripts}−ΔCt_{housekeeping gene}
ΔΔCt_{truncated SCN5A Exon 28 transcript}=ΔCt_{truncated}−ΔCt_{housekeeping gene}
ΔCt_{all SCN5A Exon 28 transcripts}=([Ct of all SCN5A Exon 28 transcripts of ICD patient (−) shock]−[Ct of all SCN5A Exon 28 transcripts of control sample])
ΔCt_{truncated}=([Ct of truncated SCN5A Exon 28 transcript of ICD patient (−) shock]−[Ct of truncated SCN5A Exon 28 transcript of control sample])
ΔCt_{housekeeping gene}=([Ct of housekeeping gene of ICD patient (−) shock]−[Ct of housekeeping gene of control sample])
wherein “ICD patient (−) shock” is a biological sample obtained from a subject known as having an ICD that has not given a shock and “control sample” is a biological sample obtained from a control subject known as (i) not having an ICD, (ii) not having a cardiac disease, (iii) having normal left ventricular function, (iv) not having diastolic dysfunction, or (v) a combination thereof, wherein “all SCN5A Exon 28 transcripts” refers to all of WT, E28A-S, E28B, E28C, and E28D.

53. The method of any one of claims 45 to 51, wherein, when R_{T}=μ−Xσ, the ratio of the biological sample obtained from the control subject is
$$\frac{Truncated SCN 5 A Exon 28 transcript}{Full length SCN 5 A Exon 28 transcript} = \frac{\begin{matrix}Calibrated abundance of \\ truncated SCN 5 A Exon 28 transcript\end{matrix}}{\begin{matrix}Calibrated abundance of full \\ length SCN 5 A Exon 28 transcript\end{matrix}}$$
wherein:
calibrated abundance of truncated SCN5A Exon 28 transcript=2^{-ΔΔCttruncated SCN5A Exon 28 transcript}
calibrated abundance of full length SCN5A Exon 28 transcript=2^{-ΔΔCtfull length SCN5A Exon 28 transcript}
ΔΔCt_{full length SCN5A Exon 28 transcript}=ΔCt_{full length}−ΔCt_{housekeeping gene}
ΔΔCt_{truncated SCN5A Exon 28 transcript}=ΔCt_{truncated}−ΔCt_{housekeeping gene}
ΔCt_{full length}=([Ct of full length SCN5A Exon 28 transcript of ICD patient (+) shock]−[Ct of full length SCN5A Exon 28 transcript of control sample])
ΔCt_{truncated}=([Ct of truncated SCN5A Exon 28 transcript of ICD patient (+) shock]−[Ct of truncated SCN5A Exon 28 transcript of control sample])
ΔCt_{housekeeping gene}=([Ct of housekeeping gene of ICD patient (+) shock]−[Ct of housekeeping gene of control sample]).
wherein “ICD patient (+) shock” is a biological sample obtained from a subject known as having an ICD that has given a shock and “control sample” is a biological sample obtained from a control subject known as (i) not having an ICD, (ii) not having a cardiac disease, (iii) having normal left ventricular function, (iv) not having diastolic dysfunction, or (v) a combination thereof, wherein “full length” refers to WT SCN5A Exon 28 transcripts or E28A-S transcripts or both WT SCN5A Exon 28 transcripts and E28A-S transcripts; or when R_{T}=μ−Xσ, the ratio of the biological sample obtained from the control subject is
$$\frac{Truncated SCN 5 A Exon 28 transcript}{All SCN 5 A Exon 28 transcripts} = \frac{\begin{matrix}Calibrated abundance of \\ truncated SCN 5 A Exon 28 transcript\end{matrix}}{Calibrated abundance of all SCN 5 A Exon 28 transcripts}$$
wherein:
calibrated abundance of truncated SCN5A Exon 28 transcript=2^{-ΔΔCttruncated SCN5A Exon 28 transcript}
calibrated abundance of all SCN5A Exon 28 transcripts=2^{-ΔΔCtall SCN5A Exon 28 transcripts}
ΔΔCt_{all SCN5A Exon 28 transcripts}=ΔCt_{all SCN5A Exon 28 transcripts}−ΔCt_{housekeeping gene}
ΔΔCt_{truncated SCN5A Exon 28 transcript}=ΔCt_{truncated}−ΔCt_{housekeeping gene}
ΔCt_{all SCN5A Exon 28 transcripts}=([Ct of all SCN5A Exon 28 transcripts of ICD patient (+) shock]−[Ct of all SCN5A Exon 28 transcripts of control sample])
ΔCt_{truncated}=([Ct of truncated SCN5A Exon 28 transcript of ICD patient (+) shock]−[Ct of truncated SCN5A Exon 28 transcript of control sample])
ΔCt_{housekeeping gene}=([Ct of housekeeping gene of ICD patient (+) shock]−[Ct of housekeeping gene of control sample])
wherein “ICD patient (+) shock” is a biological sample obtained from a subject known as having an ICD that has given a shock and “control sample” is a biological sample obtained from a control subject known as (i) not having an ICD, (ii) not having a cardiac disease, (iii) having normal left ventricular function, (iv) not having diastolic dysfunction, or (v) a combination thereof, wherein “all SCN5A Exon 28 transcripts” refers to all of WT, E28A-S, E28B, E28C, and E28D.

54. The method of any one of claims 28 to 53, wherein each level is determined via Real Time-Polymerase Chain Reaction (R_{T}-PCR).

55. The method of any one of claims 28 to 54, wherein the level of the truncated SCN5A Exon 28 transcript is a level of SCN5A Exon 28 Splice Variant C (E28C) or a level of SCN5A Exon 28 Splice Variant D (E28D).

56. The method of claim 55, wherein the level of a truncated SCN5A Exon 28 transcript is a level of E28C and E28D.

57. The method of any one of claims 28 to 56, wherein the level of the truncated SCN5A Exon 28 transcript is compared to (i) a level of WT SCN5A Exon 28 transcripts, (ii) a level of E28A-S, or (iii) a combination of (i) and (ii).

58. The method of any one of claims 28 to 56, wherein the level of the truncated SCN5A Exon 28 transcript is compared to a level of all of WT SCN5A Exon 28 transcripts, E28A-S, E28B, E28C, and E28D.

59. The method of any one of claims 28 to 56, wherein the level of the truncated SCN5A Exon 28 transcript is compared to a level of (A) and (B), wherein:
(A) is one of (i) a level of WT SCN5A Exon 28 transcripts, (ii) a level of E28A-S, or (iii) a combination of (i) and (ii), and
(B) is one or more of E28B, E28C, and E28D.

60. The method of claim 57 or 58, wherein the truncated SCN5A Exon 28 transcript is E28C.

61. The method of claim 60, wherein
$${R}_{S} = {R}_{E 28 C} = \frac{Calibrated abundance of E 28 C transcript}{\begin{matrix}Calibrated abundance of a full \\ length SCN 5 A Exon 28 transcript\end{matrix}}$$
wherein:
calibrated abundance of E28C transcript=2^{-ΔΔCtE28C transcript}
calibrated abundance of full length SCN5A Exon 28 transcript=2^{-ΔΔCtfull length SCN5A Exon 28 transcript}
ΔΔCt_{full length SCN5A Exon 28 transcript}=ΔCt_{full length}−ΔCt_{housekeeping gene}
ΔΔCt_{E28C transcript}=ΔCt_{E28C transcript}−ΔCt_{housekeeping gene}
ΔCt_{full length}=([Ct of full length SCN5A Exon 28 transcript of subject sample]−[Ct of full length SCN5A Exon 28 transcript of control sample])
ΔCt_{E28C}=([Ct of E28C transcript of subject sample]−[Ct of E28C transcript of control sample])
ΔCt_{housekeeping gene}=([Ct of housekeeping gene of subject sample]−[Ct of housekeeping gene of control sample])
wherein “subject sample” is a biological sample obtained from the subject and “control sample” is a biological sample obtained from a control subject known as (i) not having an ICD, (ii) not having a cardiac disease, (iii) having normal left ventricular function, (iv) not having diastolic dysfunction, or (v) a combination thereof, wherein “full length” refers to WT SCN5A Exon 28 transcripts or E28A-S transcripts or both WT SCN5A Exon 28 transcripts and E28A-S transcripts; or wherein
$${R}_{E 28 C} = \frac{Calibrated abundance of E 28 C transcript}{Calibrated abundance of all SCN 5 A Exon 28 transcripts}$$
wherein:
calibrated abundance of E28C transcript=2^{-ΔΔCtE28C transcript}
calibrated abundance of all SCN5A Exon 28 transcripts=2^{-ΔΔCtall SCN5A Exon 28 transcripts}
ΔΔCt_{all SCN5A Exon 28 transcripts}=ΔCt_{all SCN5A Exon 28 transcripts}−ΔCt_{housekeeping gene}
ΔΔCt_{E28C transcript}=ΔCt_{E28C transcript}−ΔCt_{housekeeping gene}
ΔCt_{all SCN5A Exon 28 transcripts}=([Ct of all SCN5A Exon 28 transcripts of subject sample]−[Ct of all SCN5A Exon 28 transcripts of control sample])
ΔCt_{E28C}=([Ct of E28C transcript of subject sample]−[Ct of E28C transcript of control sample])
ΔCt_{housekeeping gene}=([Ct of housekeeping gene of subject sample]−[Ct of housekeeping gene of control sample])
wherein “subject sample” is a biological sample obtained from the subject and “control sample” is a biological sample obtained from a control subject known as (i) not having an ICD, (ii) not having a cardiac disease, (iii) having normal left ventricular function, (iv) not having diastolic dysfunction, or (v) a combination thereof, wherein “all SCN5A Exon 28 transcripts” refers to all of WT, E28A-S, E28B, E28C, and E28D.

62. The method of claim 57 or 58, wherein truncated SCN5A Exon 28 transcript is E28D.

63. The method of claim 62, wherein
$${R}_{S} = {R}_{E 28 D} = \frac{Calibrated abundance of E 28 D transcript}{\begin{matrix}Calibrated abundance of full \\ length SCN 5 A Exon 28 transcript\end{matrix}}$$
wherein:
calibrated abundance of E28D transcript=2^{-ΔΔCtE28D transcript}
calibrated abundance of full length SCN5A Exon 28 transcript=2^{-ΔΔCtfull length SCN5A Exon 28 transcript}
ΔΔCt_{full length SCN5A Exon 28 transcript}=ΔCt_{full length}−ΔCt_{housekeeping gene}
ΔΔCt_{E28D transcript}=ΔCt_{E28D transcript}−ΔCt_{housekeeping gene}
ΔCt_{full length}=([Ct of full length SCN5A Exon 28 transcript of subject sample]−[Ct of full length SCN5A Exon 28 transcript of control sample])
ΔCt_{E28D}=([Ct of E28D transcript of subject sample]−[Ct of E28D transcript of control sample])
ΔCt_{housekeeping gene}=([Ct of housekeeping gene of subject sample]−[Ct of housekeeping gene of control sample])
wherein “subject sample” is a biological sample obtained from the subject and “control sample” is a biological sample obtained from a control subject known as (i) not having an ICD, (ii) not having a cardiac disease, (iii) having normal left ventricular function, (iv) not having diastolic dysfunction, or (v) a combination thereof, wherein “full length” refers to WT SCN5A Exon 28 transcripts or E28A-S transcripts or both WT SCN5A Exon 28 transcripts and E28A-S transcripts,
or wherein
$${R}_{E 28 D} = \frac{Calibrated abundance of E 28 D transcript}{Calibrated abundance of all SCN 5 A Exon 28 transcripts}$$
wherein:
calibrated abundance of E28D transcript=2^{-ΔΔCtE28D transcript}
calibrated abundance of all SCN5A Exon 28 transcripts=2^{-ΔΔCtall SCN5A Exon 28 transcripts}
ΔΔCt_{all SCN5A Exon 28 transcripts}=ΔCt_{all SCN5A Exon 28 transcripts}−ΔCt_{housekeeping gene}
ΔΔCt_{E28D transcript}=ΔCt_{E28D transcript}−ΔCt_{housekeeping gene}
ΔCt_{all SCN5A Exon 28 transcripts}=([Ct of all SCN5A Exon 28 transcripts of subject sample]−[Ct of all SCN5A Exon 28 transcripts of control sample])
ΔCt_{E28D}=([Ct of E28D transcript of subject sample]−[Ct of E28D transcript of control sample])
ΔCt_{housekeeping gene}=([Ct of housekeeping gene of subject sample]−[Ct of housekeeping gene of control sample])
wherein “subject sample” is a biological sample obtained from the subject and “control sample” is a biological sample obtained from a control subject known as (i) not having an ICD, (ii) not having a cardiac disease, (iii) having normal left ventricular function, (iv) not having diastolic dysfunction, or (v) a combination thereof, wherein “all SCN5A Exon 28 transcripts” refers to all of WT, E28A-S, E28B, E28C, and E28D.

64. The method of any one of claims 28 to 63, comprising determining a first R_{S} and a second R_{S}, wherein the first R_{S} compares a level of E28C to the level of all SCN5A Exon 28 transcripts and the second R_{S} compares a level of E28D to the level of all SCN5A Exon 28 transcripts.

65. The method of claim 64, wherein the first R_{S} is RE28C and the second R_{S} is E28D.

66. A method of determining a subject's risk for arrhythmias, comprising the step of determining a ratio, Rs, which compares a level of a truncated SCN5A Exon 28 transcript of a biological sample obtained from a subject to (i) a level of a full length SCN5A Exon 28 transcript of the biological sample or (ii) a level of all SCN5A Exon 28 transcripts of the biological sample or (iii) a level of a full length SCN5A Exon 28 transcript and a level or one or more truncated SCN5A Exon 28 transcripts of the biological sample.

67. The method of claim 66, wherein the subject being at risk for arrhythmias when Rs is greater than or equal to a threshold ratio, R_{T}.

68. The method of claim 66 or 67, wherein the arrhythmias is atrial arrhythmias, optionally, atrial fibrillation.

69. A method of determining a subject's risk for heart failure comprising the step of determining a ratio, Rs, which compares a level of a truncated SCN5A Exon 28 transcript of a biological sample obtained from a subject to (i) a level of a full length SCN5A Exon 28 transcript of the biological sample or (ii) a level of all SCN5A Exon 28 transcripts of the biological sample or (iii) a level of a full length SCN5A Exon 28 transcript and a level or one or more truncated SCN5A Exon 28 transcripts of the biological sample.

70. The method of claim 69, wherein the subject is at risk for heart failure when Rₛ is greater than or equal to a threshold ratio, R_{T}.

71. The method of any one of the preceding claims, comprising the step of measuring (i) a level of a full length SCN5A Exon 28 transcript, (ii) a level of truncated SCN5A transcript, or (iii) a level of all SCN5A Exon 28 transcripts, of a biological sample obtained from the subject.

72. The method of claim 71, wherein the step of measuring comprises carrying out a polymerase chain reaction, optionally, a Real-Time PCR.

73. The method of claim 71 or 72, comprising the steps of (A) measuring (i) a level of a full length SCN5A Exon 28 transcript, (ii) a level of truncated SCN5A transcript, or (iii) a level of all SCN5A Exon 28 transcripts, of a biological sample obtained from the subject, and (B) obtaining from a medical record of the subject (i) a level of a full length SCN5A Exon 28 transcript, (ii) a level of a truncated SCN5A transcript, or (iii) a level of all SCN5A Exon 28 transcripts.

74. The method of any one of the preceding claims, comprising providing to the subject an anti-arrhythmic therapy.

75. The method of claim 74, comprising the step of implanting an ICD into the subject determined to have a need therefor.

76. The method of claim 74 or 75, comprising the step of administering to the subject an anti-arrhythmic agent.

77. The method of claim 76, wherein the anti-arrhythmic agent is a sodium channel blocking agent.

78. The method of any one of the preceding claims, comprising the steps of (i) obtaining a biological sample from the subject every 6-12 months and (ii) determining R_{S} of each biological sample obtained.

79. The method of any one of the preceding claims, comprising determining a level of a SCN5A splicing factor or a UPR protein in the sample or a chaperone protein.

80. The method of claim 79, comprising determining a level of hLuc7A, RBM25, or PERK.

81. The method of claim 79, wherein the chaperone protein is CHOP or calnexin.

82. The method of any one of the preceding claims, wherein the biological sample comprises white blood cells, cardiac cells, or muscle cells from the subject.

83. The method of claim 82, wherein the biological sample is blood from the subject.

84. The method of any one of the preceding claims, wherein the subject suffers from chronic cardiac left ventricular ejection fraction of less than or about 50%.

85. The method of claim 84, wherein the subject suffers from chronic cardiac left ventricular ejection fraction of less than or about 40%.

86. The method of claim 85, wherein the subject suffers from chronic cardiac left ventricular ejection fraction of less than or about 35%.

87. The method of any one of the preceding claims, wherein the subject (i) suffers from nonischemic dilated cardiomyopathy or ischemic heart disease at least 40 days post-myocardial infarction, (ii) is classified as an NYHA functional class II or III subject, while receiving chronic medical therapy, or (iii) both (i) and (ii).

88. The method of any one of the preceding claims, wherein the subject has a structural heart disease.

89. The method of any one of claims 30-44, and 46-83, wherein the subject has an ICD.

90. The method of any one of the preceding claims, wherein the subject has been diagnosed with HF.

91. A kit comprising (a) an E28C binding agent and/or an E28D binding agent, (b) a WT SCN5A binding agent and/or an E28A-S binding agent and instructions for use.

92. The kit of claim 91, further comprising a binding agent to all SCN5A Exon 28 transcripts: WT, E28A-S, E28B, E28C, and E28D

93. The kit of claim 91 or 92, wherein the binding agents are nucleic acids.

94. A kit comprising a computer-readable storage medium having stored thereon (I) a plurality of data values, each data value is a ratio determined from a biological sample obtained from a subject of a first population, wherein the ratio compares a level of a truncated SCN5A Exon 28 transcript to (i) a level of a full length SCN5A Exon 28 transcript of the biological sample or (ii) a level of all SCN5A Exon 28 transcripts of the biological sample or (iii) a level of a full length SCN5A Exon 28 transcript and a level or one or more truncated SCN5A Exon 28 transcripts of the biological sample, wherein each subject of the first population is a subject known as having an ICD that has given a shock; (II) a Gaussian distribution of the plurality of data values; (IV) the mean value and the standard deviation of the Gaussian distribution, or (V) a threshold ratio, R_{T}, which is based on the mean value and the standard deviation of the Gaussian distribution of the plurality of data values, or access to any one or more of (I) to (V).

95. A kit comprising a computer-readable storage medium having stored thereon (I) a plurality of data values, each data value is a ratio determined from a biological sample obtained from a subject of a first population, wherein the ratio compares a level of a truncated SCN5A Exon 28 transcript to (i) a level of a full length SCN5A Exon 28 transcript of the biological sample or (ii) a level of all SCN5A Exon 28 transcripts of the biological sample or (iii) a level of a full length SCN5A Exon 28 transcript and a level or one or more truncated SCN5A Exon 28 transcripts of the biological sample, wherein each subject of the first population is a subject known as having an ICD that has not given a shock; (II) a Gaussian distribution of the plurality of data values; (IV) the mean value and the standard deviation of the Gaussian distribution, or (V) a threshold ratio, R_{T}, which is based on the mean value and the standard deviation of the Gaussian distribution of the plurality of data values, or access to any one or more of (I) to (V).

96. A kit comprising a computer-readable storage medium having stored thereon (I) a plurality of data values, each data value is a ratio determined from a biological sample obtained from a subject of a first population, wherein the ratio compares a level of a truncated SCN5A Exon 28 transcript to (i) a level of a full length SCN5A Exon 28 transcript of the biological sample or (ii) a level of all SCN5A Exon 28 transcripts of the biological sample or (iii) a level of a full length SCN5A Exon 28 transcript and a level or one or more truncated SCN5A Exon 28 transcripts of the biological sample, wherein each subject of the first population is a subject known as (I) not having an ICD, (II) not having a cardiac disease, (III) having normal left ventricular function, (IV) not having diastolic dysfunction, or (V) a combination thereof; (II) a Gaussian distribution of the plurality of data values; (IV) the mean value and the standard deviation of the Gaussian distribution, or (V) a threshold ratio, R_{T}, which is based on the mean value and the standard deviation of the Gaussian distribution of the plurality of data values, or access to any one or more of (I) to (V).

97. A system comprising:
a processor;
a memory device coupled to the processor, the memory device storing machine readable instructions that, when executed by the processor, cause the processor to:
(i) receive a plurality of data values, each data value is a ratio determined from a biological sample obtained from a subject of a first population, wherein the ratio compares a level of a truncated SCN5A Exon 28 transcript of a biological sample obtained from a subject to (A) a level of a full length SCN5A Exon 28 transcript of the biological sample or (B) a level of all SCN5A Exon 28 transcripts of the biological sample or (C) a level of a full length SCN5A Exon 28 transcript and a level or one or more truncated SCN5A Exon 28 transcripts of the biological sample, wherein each subject of the first population is a subject known as having an ICD that has given a shock;
(ii) fit the plurality of data values to a first Gaussian distribution;
(iii) determine a mean value, μ, and a standard deviation, σ, of the first Gaussian distribution;
(iv) set a first threshold ratio, R_{T}, at μ−Xσ, wherein X is a number between 0.7 and 4.0.

98. The system of claim 97, wherein R_{T}=μ−Xσ, and X is a number between 0.7 and 1.0.

99. The system of claim 97, wherein R_{T}=μ−Xσ, and X is a number between 2.0 and 4.0.

100. The system of claim 99, wherein R_{T}=μ−Xσ, and X is a number between 2.326 and 4.0.

101. The system of any one of claims 97 to 100, comprising machine readable instructions that, when executed by the processor, cause the processor to receive as input an Rs and compare Rs to R_{T}.

102. The system of claim 101, comprising machine readable instructions that, when executed by the processor, cause the processor to provide an output indicating the relationship between Rs and R_{T}.

103. The system of any one of claims 97 to 102, comprising machine readable instructions that, when executed by the processor, cause the processor to:
(i) receive a second plurality of data values, each data value of the second plurality is a ratio determined from a biological sample obtained from a subject of a second population, wherein the ratio compares a level of a truncated SCN5A Exon 28 transcript of a biological sample obtained from a subject to (A) a level of a full length SCN5A Exon 28 transcript of the biological sample or (B) a level of all SCN5A Exon 28 transcripts of the biological sample or (C) a level of a full length SCN5A Exon 28 transcript and a level or one or more truncated SCN5A Exon 28 transcripts of the biological sample, wherein each subject of the second population is a subject known as having an ICD that has not given a shock;
(ii) fit the second plurality of data values to a second Gaussian distribution;
(iii) determine a mean value, μ, and a standard deviation, σ, of the second Gaussian distribution;
(iv) set a second threshold ratio, R_{T2}, at μ+Xσ, wherein X is a number between 0.7 and 4.0.

104. The system of claim 103, wherein R_{T2}=μ+Xσ, and X is a number between 0.7 and 1.0.

105. The system of claim 103, wherein R_{T2}=μ+Xσ, and X is a number between 2.0 and 4.0.

106. The system of claim 105, wherein R_{T2}=μ+Xσ, and X is a number between 2.326 and 4.0.

107. The system of any one of claims 97 to 106, comprising machine readable instructions that, when executed by the processor, cause the processor to:
(i) receive a third plurality of data values, each data value of the third plurality is a ratio determined from a biological sample obtained from a subject of a second population, wherein the ratio compares a level of a truncated SCN5A Exon 28 transcript of a biological sample obtained from a subject to (A) a level of a full length SCN5A Exon 28 transcript of the biological sample or (B) a level of all SCN5A Exon 28 transcripts of the biological sample or (C) a level of a full length SCN5A Exon 28 transcript and a level or one or more truncated SCN5A Exon 28 transcripts of the biological sample, wherein each subject of the third population is a subject known as (I) not having an ICD, (II) not having a cardiac disease, (III) having normal left ventricular function, (IV) not having diastolic dysfunction, or (V) a combination thereof;
(ii) fit the third plurality of data values to a third Gaussian distribution;
(iii) determine a mean value, μ, and a standard deviation, σ, of the third Gaussian distribution;
(iv) set a third threshold ratio, R_{T3}, at μ+4.0σ.

108. The system of any one of claims 103 to 107, comprising machine readable instructions that, when executed by the processor, cause the processor to set a combined threshold ratio, R_{Tcombined}, at a point where the area under the curve of the first Gaussian distribution is maximized and the area under the curve of the second Gaussian distribution is minimized.

109. A system comprising:
a processor;
a memory device coupled to the processor, the memory device storing machine readable instructions that, when executed by the processor, cause the processor to:
(i) receive a plurality of data values, each data value of the plurality is a ratio determined from a biological sample obtained from a subject of a population, wherein the ratio compares a level of a truncated SCN5A Exon 28 transcript of a biological sample obtained from a subject to (A) a level of a full length SCN5A Exon 28 transcript of the biological sample or (B) a level of all SCN5A Exon 28 transcripts of the biological sample or (C) a level of a full length SCN5A Exon 28 transcript and a level or one or more truncated SCN5A Exon 28 transcripts of the biological sample, wherein each subject of the population is a subject known as having an ICD that has not given a shock;
(ii) fit the plurality of data values to a Gaussian distribution;
(iii) determine a mean value, μ, and a standard deviation, σ, of the Gaussian distribution;
(iv) set a threshold ratio, R_{T2}, at μ+Xσ, wherein X is a number between 0.7 and 4.0.

110. The system of claim 109, wherein R_{T2}=μ+Xσ, and X is a number between 0.7 and 1.0.

111. The system of claim 109, wherein R_{T2}=μ+Xσ, and X is a number between 2.0 and 4.0.

112. The system of claim 111, wherein R_{T2}=μ+Xσ, and X is a number between 2.326 and 4.0.

113. A system comprising machine readable instructions that, when executed by the processor, cause the processor to:
(i) receive a plurality of data values, each data value of the plurality is a ratio determined from a biological sample obtained from a subject of a population, wherein the ratio compares a level of a truncated SCN5A Exon 28 transcript of a biological sample obtained from a subject to (A) a level of a full length SCN5A Exon 28 transcript of the biological sample or (B) a level of all SCN5A Exon 28 transcripts of the biological sample or (C) a level of a full length SCN5A Exon 28 transcript and a level or one or more truncated SCN5A Exon 28 transcripts of the biological sample, wherein each subject of the population is a subject known as (I) not having an ICD, (II) not having a cardiac disease, (III) having normal left ventricular function, (IV) not having diastolic dysfunction, or (V) a combination thereof;
(ii) fit the plurality of data values to a Gaussian distribution;
(iii) determine a mean value, μ, and a standard deviation, σ, of the Gaussian distribution;
(iv) set a threshold ratio, R_{T3}, at μ+4.0σ.

114. A computer-readable storage medium having stored thereon machine-readable instructions executable by a processor, comprising:
(i) instructions for causing the processor to receive a plurality of data values, each data value is a ratio determined from a biological sample obtained from a subject of a first population, wherein the ratio compares a level of a truncated SCN5A Exon 28 transcript of a biological sample obtained from a subject to (A) a level of a full length SCN5A Exon 28 transcript of the biological sample or (B) a level of all SCN5A Exon 28 transcripts of the biological sample or (C) a level of a full length SCN5A Exon 28 transcript and a level or one or more truncated SCN5A Exon 28 transcripts of the biological sample, wherein each subject of the first population is a subject known as having an ICD that has given a shock;
(ii) instructions for causing the processor to fit the plurality of data values to a first Gaussian distribution;
(ii) instructions for causing the processor to determine a mean value, μ, and a standard deviation, σ, of the first Gaussian distribution;
(iii) instructions for causing the processor to set a first threshold ratio, R_{T}, at μ−Xσ, wherein X is a number between 0.7 and 4.0.

115. The computer-readable storage medium of claim 114, wherein R_{T}=μ−Xσ, and X is a number between 0.7 and 1.0.

116. The computer-readable storage medium of claim 114, wherein R_{T}=μ−Xσ, and X is a number between 2.0 and 4.0.

117. The computer-readable storage medium of claim 116, wherein R_{T}=μ−Xσ, and X is a number between 2.326 and 4.0.

118. The computer-readable storage medium of any one of claims 114 to 117, comprising instructions for causing the processor to receive as input an Rₛ and compare Rₛ to R_{T}.

119. The computer-readable storage medium of claim 118, comprising instructions for causing the processor to provide an output indicating the relationship between Rₛ and R_{T}.

120. The computer-readable storage medium of any one of claims 114 to 119, comprising instructions for causing the processor to:
(i) receive a second plurality of data values, each data value of the second plurality is a ratio determined from a biological sample obtained from a subject of a second population, wherein the ratio compares a level of a truncated SCN5A Exon 28 transcript of a biological sample obtained from a subject to (A) a level of a full length SCN5A Exon 28 transcript of the biological sample or (B) a level of all SCN5A Exon 28 transcripts of the biological sample or (C) a level of a full length SCN5A Exon 28 transcript and a level or one or more truncated SCN5A Exon 28 transcripts of the biological sample, wherein each subject of the second population is a subject known as having an ICD that has not given a shock;
(ii) fit the second plurality of data values to a second Gaussian distribution;
(iii) determine a mean value, μ, and a standard deviation, σ, of the second Gaussian distribution;
(iv) set a second threshold ratio, R_{T2}, at μ+Xσ, wherein X is a number between 0.7 and 4.0.

121. The computer-readable storage medium of claim 120, wherein R_{T2}=μ+Xσ, and X is a number between 0.7 and 1.0.

122. The computer-readable storage medium of claim 120, wherein R_{T2}=μ+Xσ, and X is a number between 2.0 and 4.0.

123. The computer-readable storage medium of claim 122, wherein R_{T2}=μ+Xσ, and X is a number between 2.326 and 4.0.

124. The computer-readable storage medium of any one of claims 114 to 123, comprising instructions for causing the processor to:
(i) receive a third plurality of data values, each data value of the third plurality is a ratio determined from a biological sample obtained from a subject of a second population, wherein the ratio compares a level of a truncated SCN5A Exon 28 transcript of a biological sample obtained from a subject to (A) a level of a full length SCN5A Exon 28 transcript of the biological sample or (B) a level of all SCN5A Exon 28 transcripts of the biological sample or (C) a level of a full length SCN5A Exon 28 transcript and a level or one or more truncated SCN5A Exon 28 transcripts of the biological sample, wherein each subject of the third population is a subject known as (I) not having an ICD, (II) not having a cardiac disease, (III) having normal left ventricular function, (IV) not having diastolic dysfunction, or (V) a combination thereof;
(ii) fit the third plurality of data values to a third Gaussian distribution;
(iii) determine a mean value, μ, and a standard deviation, σ, of the third Gaussian distribution;
(iv) set a third threshold ratio, R_{T3}, at μ+4.0σ.

125. The computer-readable storage medium of any one of claims 120 to 124, comprising instructions for causing the processor to set a combined threshold ratio, R_{Tcombined}, at a point where the area under the curve of the first Gaussian distribution is maximized and the area under the curve of the second Gaussian distribution is minimized.

126. A computer-readable storage medium having stored thereon machine-readable instructions executable by a processor, comprising:
(i) instructions for causing the processor to receive a plurality of data values, each data value of the plurality is a ratio determined from a biological sample obtained from a subject of a population, wherein the ratio compares a level of a truncated SCN5A Exon 28 transcript of a biological sample obtained from a subject to (A) a level of a full length SCN5A Exon 28 transcript of the biological sample or (B) a level of all SCN5A Exon 28 transcripts of the biological sample or (C) a level of a full length SCN5A Exon 28 transcript and a level or one or more truncated SCN5A Exon 28 transcripts of the biological sample, wherein each subject of the population is a subject known as having an ICD that has not given a shock;
(ii) instructions for causing the processor to fit the plurality of data values to a Gaussian distribution;
(iii) instructions for causing the processor to determine a mean value, μ, and a standard deviation, σ, of the Gaussian distribution;
(iv) instructions for causing the processor to set a threshold ratio, R_{T2}, at μ+Xσ, wherein X is a number between 0.7 and 4.0.

127. The computer-readable storage medium of claim 126, wherein R_{T2}=μ+Xσ, and X is a number between 0.7 and 1.0.

128. The computer-readable storage medium of claim 126, wherein R_{T2}=μ+Xσ, and X is a number between 2.0 and 4.0.

129. The computer-readable storage medium of claim 128, wherein R_{T2}=μ+Xσ, and X is a number between 2.326 and 4.0.

130. A computer-readable storage medium having stored thereon machine-readable instructions executable by a processor, comprising:
(i) instructions for causing the processor to receive a plurality of data values, each data value of the plurality is a ratio determined from a biological sample obtained from a subject of a population, wherein the ratio compares a level of a truncated SCN5A Exon 28 transcript of a biological sample obtained from a subject to (A) a level of a full length SCN5A Exon 28 transcript of the biological sample or (B) a level of all SCN5A Exon 28 transcripts of the biological sample or (C) a level of a full length SCN5A Exon 28 transcript and a level or one or more truncated SCN5A Exon 28 transcripts of the biological sample, wherein each subject of the population is a subject known as (I) not having an ICD, (II) not having a cardiac disease, (III) having normal left ventricular function, (IV) not having diastolic dysfunction, or (V) a combination thereof;
(ii) instructions for causing the processor to fit the plurality of data values to a Gaussian distribution;
(iii) instructions for causing the processor to determine a mean value, μ, and a standard deviation, σ, of the Gaussian distribution;
(iv) instructions for causing the processor to set a threshold ratio, R_{T3}, at μ+4.0σ.

131. A method implemented by a processor in a computer, the method comprising the steps of:
(i) receiving a plurality of data values, each data value is a ratio determined from a biological sample obtained from a subject of a first population, wherein the ratio compares a level of a truncated SCN5A Exon 28 transcript of a biological sample obtained from a subject to (A) a level of a full length SCN5A Exon 28 transcript of the biological sample or (B) a level of all SCN5A Exon 28 transcripts of the biological sample or (C) a level of a full length SCN5A Exon 28 transcript and a level or one or more truncated SCN5A Exon 28 transcripts of the biological sample, wherein each subject of the first population is a subject known as having an ICD that has given a shock;
(ii) fitting the plurality of data values to a first Gaussian distribution;
(ii) determining a mean value, μ, and a standard deviation, σ, of the first Gaussian distribution;
(iii) setting a first threshold ratio, R_{T}, at μ−Xσ, wherein X is a number between 0.7 and 4.0.

132. The method of claim 131, wherein R_{T}=μ−Xσ, and X is a number between 0.7 and 1.0.

133. The method of claim 131, wherein R_{T}=μ−Xσ, and X is a number between 2.0 and 4.0.

134. The method of claim 133, wherein R_{T}=μ−Xσ, and X is a number between 2.326 and 4.0.

135. The method of any one of claims 131 to 134, comprising the step of receiving as input an Rₛ and compare Rₛ to R_{T}.

136. The method of claim 135, comprising the step of providing an output indicating the relationship between Rₛ and R_{T}.

137. The method of any one of claims 131 to 136, comprising the steps of:
(i) receiving a second plurality of data values, each data value of the second plurality is a ratio determined from a biological sample obtained from a subject of a second population, wherein the ratio compares a level of a truncated SCN5A Exon 28 transcript of a biological sample obtained from a subject to (A) a level of a full length SCN5A Exon 28 transcript of the biological sample or (B) a level of all SCN5A Exon 28 transcripts of the biological sample or (C) a level of a full length SCN5A Exon 28 transcript and a level or one or more truncated SCN5A Exon 28 transcripts of the biological sample, wherein each subject of the second population is a subject known as having an ICD that has not given a shock;
(ii) fitting the second plurality of data values to a second Gaussian distribution;
(iii) determining a mean value, μ, and a standard deviation, σ, of the second Gaussian distribution;
(iv) setting a second threshold ratio, R_{T2}, at μ+Xσ, wherein X is a number between 0.7 and 4.0.

138. The method of claim 137, wherein R_{T2}=μ+Xσ, and X is a number between 0.7 and 1.0.

139. The method of claim 137, wherein R_{T2}=μ+Xσ, and X is a number between 2.0 and 4.0.

140. The method of claim 139, wherein R_{T2}=μ+Xσ, and X is a number between 2.326 and 4.0.

141. The method of any one of claims 131 to 140, comprising the steps of:
(i) receiving a third plurality of data values, each data value of the third plurality is a ratio determined from a biological sample obtained from a subject of a second population, wherein the ratio compares a level of a truncated SCN5A Exon 28 transcript of a biological sample obtained from a subject to (A) a level of a full length SCN5A Exon 28 transcript of the biological sample or (B) a level of all SCN5A Exon 28 transcripts of the biological sample or (C) a level of a full length SCN5A Exon 28 transcript and a level or one or more truncated SCN5A Exon 28 transcripts of the biological sample, wherein each subject of the third population is a subject known as (I) not having an ICD, (II) not having a cardiac disease, (III) having normal left ventricular function, (IV) not having diastolic dysfunction, or (V) a combination thereof;
(ii) fitting the third plurality of data values to a third Gaussian distribution;
(iii) determining a mean value, μ, and a standard deviation, σ, of the third Gaussian distribution;
(iv) setting a third threshold ratio, R_{T3}, at μ+4.0σ.

142. The method of any one of claims 137 to 141, comprising the step of setting a combined threshold ratio, R_{Tcombined}, at a point where the area under the curve of the first Gaussian distribution is maximized and the area under the curve of the second Gaussian distribution is minimized.

143. A method implemented by a processor in a computer, the method comprising the steps of:
(i) receiving a plurality of data values, each data value of the plurality is a ratio determined from a biological sample obtained from a subject of a population, wherein the ratio compares a level of a truncated SCN5A Exon 28 transcript of a biological sample obtained from a subject to (A) a level of a full length SCN5A Exon 28 transcript of the biological sample or (B) a level of all SCN5A Exon 28 transcripts of the biological sample or (C) a level of a full length SCN5A Exon 28 transcript and a level or one or more truncated SCN5A Exon 28 transcripts of the biological sample, wherein each subject of the population is a subject known as having an ICD that has not given a shock;
(ii) fitting the plurality of data values to a Gaussian distribution;
(iii) determining a mean value, μ, and a standard deviation, σ, of the Gaussian distribution;
(iv) setting a threshold ratio, R_{T2}, at μ+Xσ, wherein X is a number between 0.7 and 4.0.

144. The method of claim 134, wherein R_{T2}=μ+Xσ, and X is a number between 0.7 and 1.0.

145. The method of claim 134, wherein R_{T2}=μ+Xσ, and X is a number between 2.0 and 4.0.

146. The method of claim 145, wherein R_{T2}=μ+Xσ, and X is a number between 2.326 and 4.0.

147. A method implemented by a processor in a computer, the method comprising the steps of:
(i) receiving a plurality of data values, each data value of the plurality is a ratio determined from a biological sample obtained from a subject of a population, wherein the ratio compares a level of a truncated SCN5A Exon 28 transcript of a biological sample obtained from a subject to (A) a level of a full length SCN5A Exon 28 transcript of the biological sample or (B) a level of all SCN5A Exon 28 transcripts of the biological sample or (C) a level of a full length SCN5A Exon 28 transcript and a level or one or more truncated SCN5A Exon 28 transcripts of the biological sample, wherein each subject of the population is a subject known as (I) not having an ICD, (II) not having a cardiac disease, (III) having normal left ventricular function, (IV) not having diastolic dysfunction, or (V) a combination thereof;
(ii) fitting the plurality of data values to a Gaussian distribution;
(iii) determining a mean value, μ, and a standard deviation, σ, of the Gaussian distribution;
(iv) setting a threshold ratio, R_{T3}, at μ+4.0σ.

The application's sequence listing, which the Patent Office published only in electronic form, follows.

SEQUENCE LISTING (658 sequences)

SEQ ID NO: 1 - DNA, 335 bp, Homo sapiens
agtggacactgtgggcatgcgtgtccgtgcagcacatcgccgtgcaggagcctgggggaaggcctttccctcagtgagggttgcagcttccccacaggcaacgtgaggagagcctgtgcccagaagcaggatgagaagatggcaaacttcctattacctcggggcaccagcagcttccgcaggttcacacgggagtccctggcagccatcgagaagcgcatggcggagaagcaagcccgcggctcaaccaccttgcaggagagccgagaggggctgcccgaggaggaggctccccggccccagctggacctgcaggcctccaaaaagctgccaga

SEQ ID NO: 2 - DNA, 302 bp, Homo sapiens
acatcgccgtgcaggagcctgggggaaggcctttccctcagtgagggttgcagcttccccacaggcaacgtgaggagagcctgtgcccagaagcaggatgagaagatggcaaacttcctattacctcggggcaccagcagcttccgcaggttcacacgggagtccctggcagccatcgagaagcgcatggcggagaagcaagcccgcggctcaaccaccttgcaggagagccgagaggggctgcccgaggaggaggctccccggccccagctggacctgcaggcctccaaaaagctgccaga

SEQ ID NO: 3 - DNA, 301 bp, Homo sapiens
catcgccgtgcaggagcctgggggaaggcctttccctcagtgagggttgcagcttccccacaggcaacgtgaggagagcctgtgcccagaagcaggatgagaagatggcaaacttcctattacctcggggcaccagcagcttccgcaggttcacacgggagtccctggcagccatcgagaagcgcatggcggagaagcaagcccgcggctcaaccaccttgcaggagagccgagaggggctgcccgaggaggaggctccccggccccagctggacctgcaggcctccaaaaagctgccaga

SEQ ID NO: 4 - DNA, 298 bp, Homo sapiens
cgccgtgcaggagcctgggggaaggcctttccctcagtgagggttgcagcttccccacaggcaacgtgaggagagcctgtgcccagaagcaggatgagaagatggcaaacttcctattacctcggggcaccagcagcttccgcaggttcacacgggagtccctggcagccatcgagaagcgcatggcggagaagcaagcccgcggctcaaccaccttgcaggagagccgagaggggctgcccgaggaggaggctccccggccccagctggacctgcaggcctccaaaaagctgccaga

SEQ ID NO: 5 - DNA, 236 bp, Homo sapiens
aacgtgaggagagcctgtgcccagaagcaggatgagaagatggcaaacttcctattacctcggggcaccagcagcttccgcaggttcacacgggagtccctggcagccatcgagaagcgcatggcggagaagcaagcccgcggctcaaccaccttgcaggagagccgagaggggctgcccgaggaggaggctccccggccccagctggacctgcaggcctccaaaaagctgccaga

SEQ ID NO: 6 - DNA, 220 bp, Homo sapiens
gtgcccagaagcaggatgagaagatggcaaacttcctattacctcggggcaccagcagcttccgcaggttcacacgggagtccctggcagccatcgagaagcgcatggcggagaagcaagcccgcggctcaaccaccttgcaggagagccgagaggggctgcccgaggaggaggctccccggccccagctggacctgcaggcctccaaaaagctgccaga

SEQ ID NO: 7 - DNA, 321 bp, Homo sapiens
ggagccctcctagtgagtatgaagtgatatctcactgaggttttggtttgcaaaagcaaatgactgatgactaacgatgcaggacatctttccatgtgcatgttggtcatttatatatcttccttggagaaatctctattcagatccttagctcatttttaattgggttatttctcttcttcttgttgagttgtaagagttctttacatattctggatcacagtctcttatcagatatatgatttaaaaatattttctcctagtctgtgagttttttcatttcctagtggtgtccattaaagcacaaaagttttacatgtt

SEQ ID NO: 8 - DNA, 164 bp, Homo sapiens
gaactgcacaatgaccagcaggaggggagaagagagtaggaaaaaggagggaaggacagacatcaagtgccagatgttgtctgaactaatcgagcacttctcaccaaacttcatgtataaataaaatacatatttttaaaacaaaccaataaatggcttacatg

SEQ ID NO: 9 - DNA, 114 bp, Homo sapiens
ggcactgtgctctcggacatcatccagaagtacttcttctccccgacgctcttccgagtcatccgcctggcccgaataggccgcatcctcagactgatccgaggggccaagggg

SEQ ID NO: 10 - DNA, 410 bp, Homo sapiens
gaacagagccgcggagccgagacggcggcggcgcccgtaggatgcagggatcgctcccccggggccgctgagcctgcgcccagtgccccgagccccgcgccgagccgagtccgcgccaagcagcagccgcccaccccggggcccggccgggggaccagcagcttccccacaggcaacgtgaggagagcctgtgcccagaagcaggatgagaagatggcaaacttcctattacctcggggcaccagcagcttccgcaggttcacacgggagtccctggcagccatcgagaagcgcatggcggagaagcaagcccgcggctcaaccaccttgcaggagagccgagaggggctgcccgaggaggaggctccccggccccagctggacctgcaggcctccaaaaagctgccaga

SEQ ID NO: 11 - DNA, 250 bp, Homo sapiens
gcttccccacaggcaacgtgaggagagcctgtgcccagaagcaggatgagaagatggcaaacttcctattacctcggggcaccagcagcttccgcaggttcacacgggagtccctggcagccatcgagaagcgcatggcggagaagcaagcccgcggctcaaccaccttgcaggagagccgagaggggctgcccgaggaggaggctccccggccccagctggacctgcaggcctccaaaaagctgccaga

SEQ ID NO: 12 - DNA, 2066 bp, Homo sapiens
ggcactgtgctctcggacatcatccagaagtacttcttctccccgacgctcttccgagtcatccgcctggcccgaataggccgcatcctcagactgatccgaggggccaaggggatccgcacgctgctctttgccctcatgatgtccctgcctgccctcttcaacatcgggctgctgctcttcctcgtcatgttcatctactccatctttggcatggccaacttcgcttatgtcaagtgggaggctggcatcgacgacatgttcaacttccagaccttcgccaacagcatgctgtgcctcttccagatcaccacgtcggccggctgggatggcctcctcagccccatcctcaacactgggccgccctactgcgaccccactctgcccaacagcaatggctctcggggggactgcgggagcccagccgtgggcatcctcttcttcaccacctacatcatcatctccttcctcatcgtggtcaacatgtacattgccatcatcctggagaacttcagcgtggccacggaggagagcaccgagcccctgagtgaggacgacttcgatatgttctatgagatctgggagaaatttgacccagaggccactcagtttattgagtattcggtcctgtctgactttgccgacgccctgtctgagccactccgtatcgccaagcccaaccagataagcctcatcaacatggacctgcccatggtgagtggggaccgcatccattgcatggacattctctttgccttcaccaaaagggtcctgggggagtctggggagatggacgccctgaagatccagatggaggagaagttcatggcagccaacccatccaagatctcctacgagcccatcaccaccacactccggcgcaagcacgaagaggtgtcggccatggttatccagagagccttccgcaggcacctgctgcaacgctctttgaagcatgcctccttcctcttccgtcagcaggcgggcagcggcctctccgaagaggatgcccctgagcgagagggcctcatcgcctacgtgatgagtgagaacttctcccgaccccttggcccaccctccagctcctccatctcctccacttccttcccaccctcctatgacagtgtcactagagccaccagcgataacctccaggtgcgggggtctgactacagccacagtgaagatctcgccgacttccccccttctccggacagggaccgtgagtccatcgtgtgagcctcggcctggctggccaggacacactgaaaagcagcctttttcaccatggcaaacctaaatgcagtcagtcacaaaccagcctggggccttcctggctttgggagtaagaaatgggcctcagccccgcggatcaaccaggcagagttctgtggcgccgcgtggacagccggagcagttggcctgtgcttggaggcctcagatagacctgtgacctggtctggtcaggcaatgccctgcggctctggaaagcaacttcatcccagctgctgaggcgaaatataaaactgagactgtatatgttgtgaatgggctttcataaatttattatatttgatatttttttacttgagcaaagaactaaggatttttccatggacatgggcagcaattcacgctgtctcttcttaaccctgaacaagagtgtctatggagcagccggaagtctgttctcaaagcagaagtggaatccagtgtggctcccacaggtcttcactgcccaggggtcgaatggggtccccctcccacttgacctgagatgctgggagggctgaacccccactcacacaagcacacacacacagtcctcacacacggaggccagacacaggccgtgggacccaggctcccagcctaagggagacaggcctttccctgccggccccccaaggatggggttcttgtccacggggctcactctggccccctattgtctccaaggtcccattttccccctgtgttttcacgcaggtcatattgtcagtcctacaaaaataaaaggcttccagaggagagtggcctgggtcccagggctggccctaggcact

SEQ ID NO: 13 - DNA, 3497 bp, Homo sapiens
ggcactgtgctctcggacatcatccagaagtacttcttctccccgacgctcttccgagtcatccgcctggcccgaataggccgcatcctcagactgatccgaggggccaaggggatccgcacgctgctctttgccctcatgatgtccctgcctgccctcttcaacatcgggctgctgctcttcctcgtcatgttcatctactccatctttggcatggccaacttcgcttatgtcaagtgggaggctggcatcgacgacatgttcaacttccagaccttcgccaacagcatgctgtgcctcttccagatcaccacgtcggccggctgggatggcctcctcagccccatcctcaacactgggccgccctactgcgaccccactctgcccaacagcaatggctctcggggggactgcgggagcccagccgtgggcatcctcttcttcaccacctacatcatcatctccttcctcatcgtggtcaacatgtacattgccatcatcctggagaacttcagcgtggccacggaggagagcaccgagcccctgagtgaggacgacttcgatatgttctatgagatctgggagaaatttgacccagaggccactcagtttattgagtattcggtcctgtctgactttgccgacgccctgtctgagccactccgtatcgccaagcccaaccagataagcctcatcaacatggacctgcccatggtgagtggggaccgcatccattgcatggacattctctttgccttcaccaaaagggtcctgggggagtctggggagatggacgccctgaagatccagatggaggagaagttcatggcagccaacccatccaagatctcctacgagcccatcaccaccacactccggcgcaagcacgaagaggtgtcggccatggttatccagagagccttccgcaggcacctgctgcaacgctctttgaagcatgcctccttcctcttccgtcagcaggcgggcagcggcctctccgaagaggatgcccctgagcgagagggcctcatcgcctacgtgatgagtgagaacttctcccgaccccttggcccaccctccagctcctccatctcctccacttccttcccaccctcctatgacagtgtcactagagccaccagcgataacctccaggtgcgggggtctgactacagccacagtgaagatctcgccgacttccccccttctccggacagggaccgtgagtccatcgtgtgagcctcggcctggctggccaggacacactgaaaagcagcctttttcaccatggcaaacctaaatgcagtcagtcacaaaccagcctggggccttcctggctttgggagtaagaaatgggcctcagccccgcggatcaaccaggcagagttctgtggcgccgcgtggacagccggagcagttggcctgtgcttggaggcctcagatagacctgtgacctggtctggtcaggcaatgccctgcggctctggaaagcaacttcatcccagctgctgaggcgaaatataaaactgagactgtatatgttgtgaatgggctttcataaatttattatatttgatatttttttacttgagcaaagaactaaggatttttccatggacatgggcagcaattcacgctgtctcttcttaaccctgaacaagagtgtctatggagcagccggaagtctgttctcaaagcagaagtggaatccagtgtggctcccacaggtcttcactgcccaggggtcgaatggggtccccctcccacttgacctgagatgctgggagggctgaacccccactcacacaagcacacacacacagtcctcacacacggaggccagacacaggccgtgggacccaggctcccagcctaagggagacaggcctttccctgccggccccccaaggatggggttcttgtccacggggctcactctggccccctattgtctccaaggtcccattttccccctgtgttttcacgcaggtcatattgtcagtcctacaaaaataaaaggcttccagaggagagtggcctgggtcccagggctggccctaggcactgatagttgccttttcttcccctcctgtaagagtattaacaaaaccaaaggacacaagggtgcaagccccattcacggcctggcatgcagcttgtccttgctcctggaacctggcaggccctgcccagccagccatcggaagagagggctgagccatgggggtttggggctaagaagttcaccagccctgagccatggcggcccctcagcctgcctgaagagaggaaactggcgatctcccagggctctctggaccatacgcggaggagttttctgtgtggtctccagctcctctccagacacagagacatgggagtggggagcggagcttggccctgcgccctgtgcagggaaagggatggtcaggcccagttctcgtgcccttagaggggaatgaaccatggcacctttgagagagggggcactgtggtcaggcccagcctctctggctcagcccgggatcctgatggcacccacacagaggacctctttggggcaagatccaggtggtcccataggtcttgtgaaaaggctttttcagggaaaaatattttactagtccaatcacccccaggacctcttcagctgctgacaatcctatttagcatatgcaaatcttttaacatagagaactgtcaccctgaggtaacagggtcaactggcgaagcctgagcaggcaggggcttggctgccccattccagctctcccatggagcccctccaccgggcgcatgcctcccaggccacctcagtctcacctgccggctctgggctggctgctcctaacctacctcgccgagctgtcggagggctggacatttgtggcagtgctgaagggggcattgccggcgagtaaagtattatgtttcttcttgtcaccccagttcccttggtggcaaccccagacccaacccatgcccctgacagatctagttctcttctcctgtgttccctttgagtccagtgtgggacacggtttaactgtcccagcgacatttctccaagtggaaatcctatttttgtagatctccatgctttgctctcaaggcttggagaggtatgtgcccctcctgggtgctcaccgcctgctacacaggcaggaatgcggttgggaggcaggtcgggctgccagcccagctggccggaaggagactgtggtttttgtgtgtgtggacagcccgggagctttgagacaggtgcctggggctggctgcagacggtgtggttgggggtgggaggtgagctagacccaacccttagcttttagcctggctgtcacctttttaatttccagaactgcacaatgaccagcaggagggaaggacagacatcaagtgccagatgttgtctgaactaatcgagcacttctcaccaaacttcatgtataaataaaatacatatttttaaaacaaaccaataaatggcttacatg

SEQ ID NO: 14 - protein, 412 aa, Homo sapiens
GTVLSDIIQKYFFSPTLFRVIRLARIGRILRLIRGAKGIRTLLFALMMSLPALFNIGLLLFLVMFIYSIFGMANFAYVKWEAGIDDMFNFQTFANSMLCLFQITTSAGWDGLLSPILNTGPPYCDPTLPNSNGSRGDCGSPAVGILFFTTYIIISFLIVVNMYIAIILENFSVATEESTEPLSEDDFDMFYEIWEKFDPEATQFIEYSVLSDFADALSEPLRIAKPNQISLINMDLPMVSGDRIHCMDILFAFTKRVLGESGEMDALKIQMEEKFMAANPSKISYEPITTTLRRKHEEVSAMVIQRAFRRHLLQRSLKHASFLFRQQAGSGLSEEDAPEREGLIAYVMSENFSRPLGPPSSSSISSTSFPPSYDSVTRATSDNLQVRGSDYSHSEDLADFPPSPDRDRESIV

SEQ ID NO: 15 - protein, 8 aa, Homo sapiens
GALLVSMK

SEQ ID NO: 16 - protein, 12 aa, Homo sapiens
ELHNDQQEGRRE

SEQ ID NO: 17 - protein, 128 aa, Homo sapiens
NKYQGFIFDIVTKQAFDVTIMFLICLNMVTMMVETDDQSPEKINILAKINLLFVAIFTGECIVKLAALRHYYFTNSWNIFDFVVVILSIVGTVLSDIIQKYFFSPTLFRVIRLARIGRILRLIRGAKG

SEQ ID NO: 18 - DNA, 22 bp, Artificial Sequence
  Synthetic primer
ttacgcaccttccgagtcctcc

SEQ ID NO: 19 - DNA, 22 bp, Artificial Sequence
  Synthetic primer
gatgagggcaaagacgctgagg

SEQ ID NO: 20 - DNA, 24 bp, Artificial Sequence
  Synthetic primer
tctcttctcccctcctgctggtca

SEQ ID NO: 21 - DNA, 25 bp, Artificial Sequence
  Synthetic primer
ggaagagcgtcggggagaagaagta

SEQ ID NO: 22 - DNA, 20 bp, Artificial Sequence
  Synthetic primer
agtctctgctggagtcttca

SEQ ID NO: 23 - DNA, 22 bp, Artificial Sequence
  Synthetic primer
tgacactgtgtctcagactctt

SEQ ID NO: 24 - DNA, 25 bp, Artificial Sequence
  Synthetic primer
tgtcttttccacctcatttgaatcg

SEQ ID NO: 25 - DNA, 23 bp, Artificial Sequence
  Synthetic primer
attggtacaggaatcattggggt

SEQ ID NO: 26 - DNA, 25 bp, Artificial Sequence
  Synthetic primer
ggaccaagatcagaacgtgtatttg

SEQ ID NO: 27 - DNA, 24 bp, Artificial Sequence
  Synthetic primer
cagttgttggatgagttaatgggc

SEQ ID NO: 28 - DNA, 20 bp, Artificial Sequence
  Synthetic primer
tctgctgagtccgcagcagg

SEQ ID NO: 29 - DNA, 20 bp, Artificial Sequence
  Synthetic primer
ctctaagactagaggcttgg

SEQ ID NO: 30 - DNA, 16 bp, Artificial Sequence
  Synthetic primer
ggatcggcggctccat

SEQ ID NO: 31 - DNA, 22 bp, Artificial Sequence
  Synthetic primer
catactcctgcttgctgatcca

SEQ ID NO: 32 - RNA, 20 nt, Artificial Sequence
  RNA substrate
cagcaggcgggcagcggccu

SEQ ID NO: 33 - RNA, 20 nt, Artificial Sequence
  RNA substrate
cagcagguuagaggcggccu

SEQ ID NO: 34 - DNA, 2020 bp, Homo sapiens
  ref <308>: DATABASE ACCESSION NUMBER: NCBI / NM_006107.3
  ref <309>: DATABASE ENTRY DATE: 2011-08-14
  ref <313>: RELEVANT RESIDUES IN SEQ ID NO: (1)..(2020)
acggcatgctgggaaggcgtccgcgcggcggccattttgtcttgtcggctcctgtgtgtaggagggatttcggcctgagagcgggccgaggagattggcgacggtgtcgcccgtgttttcgttggcgggtgcctgggctggtgggaacagccgcccgaaggaagcaccatgatttcggccgcgcagttgttggatgagttaatgggccgggaccgaaacctagccccggacgagaagcgcagcaacgtgcggtgggaccacgagagcgtttgtaaatattatctctgtggtttttgtcctgcggaattgttcacaaatacacgttctgatcttggtccgtgtgaaaaaattcatgatgaaaatctacgaaaacagtatgagaagagctctcgtttcatgaaagttggctatgagagagattttttgcgatacttacagagcttacttgcagaagtagaacgtaggatcagacgaggccatgctcgtttggcattatctcaaaaccagcagtcttctggggccgctggcccaacaggcaaaaatgaagaaaaaattcaggttctaacagacaaaattgatgtacttctgcaacagattgaagaattagggtctgaaggaaaagtagaagaagcccaggggatgatgaaattagttgagcaattaaaagaagagagagaactgctaaggtccacaacgtcgacaattgaaagctttgctgcacaagaaaaacaaatggaagtttgtgaagtatgtggagcctttttaatagtaggagatgcccagtcccgggtagatgaccatttgatgggaaaacaacacatgggctatgccaaaattaaagctactgtagaagaattaaaagaaaagttaaggaaaagaaccgaagaacctgatcgtgatgagcgtctaaaaaaggagaagcaagaaagagaagaaagagaaaaagaacgggagagagaaagggaagaaagagaaaggaaaagacgaagggaagaggaagaaagagaaaaagaaagggctcgtgacagagaaagaagaaagagaagtcgttcacgaagtagacactcaagccgaacatcagacagaagatgcagcaggtctcgggaccacaaaaggtcacgaagtagagaaagaaggcggagcagaagtagagatcgacgaagaagcagaagccatgatcgatcagaaagaaaacacagatctcgaagtcgggatcgaagaagatcaaaaagccgggatcgaaagtcatataagcacaggagcaaaagtcgggacagagaacaagatagaaaatccaaggagaaagaaaagaggggatctgatgataaaaaaagtagtgtgaagtccggtagtcgagaaaagcagagtgaagacacaaacactgaatcgaaggaaagtgatactaagaatgaggtcaatgggaccagtgaagacattaaatctgaaggtgacactcagtccaattaaaactgatctgataagacctcagatcagacagaggactactgttcgaagatttttggaagaatactgagaacggcataaagtgaagatcgacatttaaaaaatgaggtgaaagaaagctatagtggcatagaaaaagtataaagctcagttagtttttttattattattattattaaaagttaattcaggactgatgtgacctaccagatttcagaacatgtgttaatagtatatatgccactgaaaacttaggtcctgtatcatacttttttctttaagactttttaagaaatattacttaaacatgtggcttgctcagtgtttaattgcaagttttcaatcttggactttgaaaacaggattaaacgttagtattcgtgtgaatcagactaagtgggatttcatttttacaactctgctctacttagcctttggatttagaagtaaaaataaagtatctctgactttctgttacaaagttgattgtctctgtcattgaaaagttttagtattaatctttttctaataaagttattgactctgaaaaaaaaaa

SEQ ID NO: 35 - DNA, 3525 bp, Homo sapiens
  ref <308>: DATABASE ACCESSION NUMBER: NCBI / NM_016424.4
  ref <309>: DATABASE ENTRY DATE: 2011-08-14
  ref <313>: RELEVANT RESIDUES IN SEQ ID NO: (1)..(3525)
acggcatgctgggaaggcgtccgcgcggcggccattttgtcttgtcggctcctgtgtgtaggagggatttcggcctgagagcgggccgaggagattggcgacggtgtcgcccgtgttttcgttggcgggtgcctgggctggtgggaacagccgcccgaaggaagcaccatgatttcggccgcgcagttgttggatgagttaatgggccgggaccgaaacctagccccggacgagaagcgcagcaacgtgcggtgggaccacgagagcgtttgtaaatattatctctgtggtttttgtcctgcggaattgttcacaaatacacgttctgatcttggtccgtgtgaaaaaattcatgatgaaaatctacgaaaacagtatgagaagagctctcgtttcatgaaagttggctatgagagagattttttgcgatacttacagagcttacttgcagaagtagaacgtaggatcagacgaggccatgctcgtttggcattatctcaaaaccagcagtcttctggggccgctggcccaacaggcaaaaatgaagaaaaaattcaggttctaacagacaaaattgatgtacttctgcaacagattgaagaattagggtctgaaggaaaagtagaagaagcccaggggatgatgaaattagttgagcaattaaaagaagagagagaactgctaaggtccacaacgtcgacaattgaaagctttgctgcacaagaaaaacaaatggaagtttgtgaagtatgtggagcctttttaatagtaggagatgcccagtcccgggtagatgaccatttgatgggaaaacaacacatgggctatgccaaaattaaagctactgtagaagaattaaaagaaaagttaaggaaaagaaccgaagaacctgatcgtgatgagcgtctaaaaaaggagaagcaagaaagagaagaaagagaaaaagaacgggagagagaaagggaagaaagagaaaggaaaagacgaagggaagaggaagaaagagaaaaagaaagggctcgtgacagagaaagaagaaagagaagtcgttcacgaagtagacactcaagccgaacatcagacagaagatgcagcaggtctcgggaccacaaaaggtcacgaagtagagaaagaaggcggagcagaagtagagatcgacgaagaagcagaagccatgatcgatcagaaagaaaacacagatctcgaagtcgggatcgaagaagatcaaaaagccgggatcgaaagtcatataagcacaggagcaaaagtcgggacagagaacaagatagaaaatccaaggagaaagaaaagaggggatctgatgataaaaaaagtagtgtgaagtccggtagtcgagaaaagcagagtgaagacacaaacactgaatcgaaggaaagtgatactaagaatgaggtcaatgggaccagtgaagacattaaatctgaaggtgacactcagtccaattaaaactgatctgataagacctcagatcagacagaggtaagtgtattgtttctcactttgattagggctttttgttactgtttgacagtgcagcgtaagtatgcacagatgaagatggaactaagccgagtaagaagacatacaaaagcctcttctgaaggaaaagacagtgtagtcctgcaaaacattttgaggtacattgttttgtctcagctattttgtagcagactcgtgcccccattagtgtgcctctttggaaattatcgcccacatttgtaatatagtcgccattgaaaagttaattatcctttttttagggattttgatgtcatttcttttttttttttaataaaaaggttgaactgtttttttttttctttttggtattaagtccatcttgtgttggtacattggcagagacatatgctttaaaaacttaaatatttcggaggcacatgttggactactttgttttaattaaactgctagtatttctttgtcaaggatgtttctagttttttgctttattgccttgcattctaatgcagtttgttctgtaactcgagagccagtagcattggattgatggaagtgtagggtttatgaattattgcagctgactaccatacctcacacagcgttggtgttgtgagcggcccatgaaaagccaaattaaaaatcaaggattcagtcaaactaagcaggtactcatgccaggtactcctttctctacccacatccatgtttgaatgctattgcctgtgatctttacgcttaactgttgtgtatcttttttgttctttacaagaagtgcagaggggttttttgtgtattgcgtgaaaacttataaaacaaatgttaacagaatggaattttttttcaactgtatgtagggctgcagtggtggccagaattagatatctttaaagaattttaaatacaataaacacttcatattattcgccttgttacactcaatgcaattctcaagtctataagaggtatgtgcttaatatttcctactgtgtaggagaatttgcagtcagccataggtatgtaggaatagtcactcactggctgatacatttaaagcagcagtgtgaatagcaaggacagacaccttcaatttgtgaaatcaaagaactgatgcactatatagaacgaatttgggtttttaaagaaatattaaaagttaggtactgtaagtgttcttaaaacctgtaaacttcattctgtgggctagtggtgtgggacaaaatattcctaatgaaaggaagtaccaattagttgatttgttggtggcattccccttttgggaaagcaatgtaaggttatgtctgtgtatgtcattcacacttaggcaagcatacacaggcacatggctttaagaaccacactgatgccttgataattaaaaagaatacaagcattccatgtacacatgttaattagcagttagtgactgggccaacactttctcataaaaattggccttttacatgttgtctaattatcatttttccccaaattttgcgttgtaggactactgttcgaagatttttggaagaatactgagaacggcataaagtgaagatcgacatttaaaaaatgaggtgaaagaaagctatagtggcatagaaaaagtataaagctcagttagtttttttattattattattattaaaagttaattcaggactgatgtgacctaccagatttcagaacatgtgttaatagtatatatgccactgaaaacttaggtcctgtatcatacttttttctttaagactttttaagaaatattacttaaacatgtggcttgctcagtgtttaattgcaagttttcaatcttggactttgaaaacaggattaaacgttagtattcgtgtgaatcagactaagtgggatttcatttttacaactctgctctacttagcctttggatttagaagtaaaaataaagtatctctgactttctgttacaaagttgattgtctctgtcattgaaaagttttagtattaatctttttctaataaagttattgactctgaaaaaaaaaa

SEQ ID NO: 36 - protein, 432 aa, Homo sapiens
  ref <308>: DATABASE ACCESSION NUMBER: NCBI / NP_006098.2
  ref <309>: DATABASE ENTRY DATE: 2011-08-14
  ref <313>: RELEVANT RESIDUES IN SEQ ID NO: (1)..(432)
MISAAQLLDELMGRDRNLAPDEKRSNVRWDHESVCKYYLCGFCPAELFTNTRSDLGPCEKIHDENLRKQYEKSSRFMKVGYERDFLRYLQSLLAEVERRIRRGHARLALSQNQQSSGAAGPTGKNEEKIQVLTDKIDVLLQQIEELGSEGKVEEAQGMMKLVEQLKEERELLRSTTSTIESFAAQEKQMEVCEVCGAFLIVGDAQSRVDDHLMGKQHMGYAKIKATVEELKEKLRKRTEEPDRDERLKKEKQEREEREKEREREREERERKRRREEEEREKERARDRERRKRSRSRSRHSSRTSDRRCSRSRDHKRSRSRERRRSRSRDRRRSRSHDRSERKHRSRSRDRRRSKSRDRKSYKHRSKSRDREQDRKSKEKEKRGSDDKKSSVKSGSREKQSEDTNTESKESDTKNEVNGTSEDIKSEGDTQSN

SEQ ID NO: 37 - protein, 432 aa, Homo sapiens; identical to SEQ ID NO: 36
  ref <308>: DATABASE ACCESSION NUMBER: NCBI / NP_057508.2
  ref <309>: DATABASE ENTRY DATE: 2011-08-14
  ref <313>: RELEVANT RESIDUES IN SEQ ID NO: (1)..(432)

SEQ ID NO: 38 - DNA, 4303 bp, Homo sapiens
  ref <308>: DATABASE ACCESSION NUMBER: NCBI / NM_021239.2
  ref <309>: DATABASE ENTRY DATE: 2011-08-14
  ref <313>: RELEVANT RESIDUES IN SEQ ID NO: (1)..(4303)
agtgcacgccgggcaagaggaagacctccatcagctcgccgcgcagcgcggctgtatttgcggcctgtgcgagtaggcgcttgggcactcagtctccctggcgagcgacgggcagaaatctcgaaccagtggagcgcactcgtaacctggatcccagaaggtcgcgaaggcagtaccgtttcctcagcggcggactgctgcagtaagaatgtcttttccacctcatttgaatcgccctcccatgggaatcccagcactcccaccagggatcccacccccgcagtttccaggatttcctccacctgtacctccagggaccccaatgattcctgtaccaatgagcattatggctcctgctccaactgtcttagtacccactgtgtctatggttggaaagcatttgggcgcaagaaaggatcatccaggcttaaaggctaaagaaaatgatgaaaattgtggtcctactaccactgtttttgttggcaacatttccgagaaagcttcagacatgcttataagacaactcttagctaaatgtggtttggttttgagctggaagagagtacaaggtgcttccggaaagcttcaagccttcggattctgtgagtacaaggagccagaatctaccctccgtgcactcagattattacatgacctgcaaattggagagaaaaagctactcgttaaagttgatgcaaagacaaaggcacagctggatgaatggaaagcaaagaagaaagcttctaatgggaatgcaaggccagaaactgtcactaatgacgatgaagaagccttggatgaagaaacaaagaggagagatcagatgattaaaggggctattgaagttttaattcgtgaatactccagtgagctaaatgccccctcacaggaatctgattctcaccccaggaagaagaagaaggaaaagaaggaggacattttccgcagatttccagtggccccactgatcccttatccactcatcactaaggaggatataaatgctatagaaatggaagaagacaaaagagacctgatatctcgagagatcagcaaattcagagacacacataagaaactggaagaagagaaaggcaaaaaggaaaaagaaagacaggaaattgagaaagaacggagagaaagagagagggagcgtgaaagggaacgagaaaggcgagaacgggaacgagaaagggaaagagaacgtgaacgagaaaaggagaaagaacgggagcgggaacgagaacgggatagggaccgtgaccggacaaaagagagagaccgagatcgggatcgagagagagatcgtgaccgggatagagaaaggagctcagatcgtaataaggatcgcagtcgatcaagagaaaaaagcagagatcgtgaaagggaacgagagcgggaaagagagagagagagagaacgagagcgagaacgagaacgggagcgagagagagagcgagagagggaacgggagcgagaaagagaaaaagacaaaaaacgggaccgagaagaagatgaagaagatgcatacgaacgaagaaaacttgaaagaaaactccgagagaaagaagctgcttatcaagagcgccttaagaattgggaaatcagagaacgaaagaaaacccgggaatatgagaaagaagctgaaagagaagaagaaagaagaagagaaatggccaaagaagctaaacgactaaaagaattcttagaagactatgatgatgatagagatgaccccaaatattacagaggaagtgctcttcagaaaaggttgcgtgatagagaaaaggaaatggaagcagatgaacgagataggaagagagagaaggaggagcttgaggaaatcaggcagcgccttctggcagaagggcatccagatccagatgcagagctccagaggatggaacaagaggctgagaggcgcaggcagccacaaataaagcaagagccagaatcagaagaggaggaagaagaaaagcaagaaaaagaagaaaaacgagaagaacccatggaagaggaagaggagccagagcaaaagccttgtctgaaacctactctgaggcccatcagctctgctccatctgtttcctctgccagtggcaatgcaacacctaacactcctggggatgagtctccctgtggtattattattcctcatgaaaactcaccagatcaacagcaacctgaggagcataggccaaaaataggactaagtcttaaactgggtgcttccaatagtcctggtcagcctaattctgtgaagagaaagaaactacctgtagatagtgtctttaacaaatttgaggatgaagacagtgatgacgtaccccgaaaaaggaaactggttcccttggattatggtgaagatgataaaaatgcaaccaaaggcactgtaaacactgaagaaaagcgtaaacacattaagagtctcattgagaaaatccctacagccaaacctgagctcttcgcttatcccctggattggtctattgtggattctatactgatggaacgtcgaattagaccatggattaataagaaaatcatagaatatataggtgaagaagaagctacattagttgattttgtttgttctaaggttatggctcatagttcaccccagagcattttagatgatgttgccatggtacttgatgaagaagcagaagtttttatagtcaaaatgtggagattattgatatatgaaacagaagccaagaaaattggtcttgtgaagtaaaactttttatatttagagttccatttcagatttcttctttgccacccttttaaggactttgaatttttctttgtctttgaagacattgtgagatctgtaattttttttttttgtagaaaatgtgaattttttggtcctctaatttgttgttgccctgtgtactcccttggttgtaaagtcatctgaatccttggttctctttatactcaccaggtacaaattactggtatgttttataagccgcagctactgtacacagcctatctgatataatcttgttctgctgatttgtttcttgtaaatattaaaacgactccccaattattttgcagaattgcacttaatattgaaatgtactgtataggaaccaacatgaacaattttaattgaaaacaccagtcataaactattaccacccccactctcttttgatcagaaatggcaagcccttgtgaaggcatggagtttaaaattggaatgcaaaaattagcagacaatccattcctactgtatttctgtatgaatgtgtttgtgaatgtatgtgtaaaagtctttcttttccctaatttgctttggtggggtccttaaaacatttcccaactaaagaatagaattgtaaaggaaaagtggtactgttccaacctgaaatgtctgttataattaggttattagtttcccagagcatggtgttctcgtgtcgtgagcaatgtggtttgctaactggatggggttttcttattaataagatggctgcttcagcttctcttttaaaggaatgtggatcatagtgatttttccttttaattttattgctcagaaatgaggcatatcctaaaaatcctggagagctgtatttaatgcatttttgcactaattggtccttagtttaattctattgtatctgtttatttaacaaaaaattcatcataccaaaaagtgtaagtgaaaaccccctttaaaacaaaacaaaaaaatgaaataaaattaggcaaattgacagacagtgagagttttacaaacatgataggtattctgctcggcaatttgtaagtttacatgttatttaaggataaaggtaaatcattcaaggcagttaccaaccactaactatttgttttcatttttgtcttgtagaaggtttatatcttgttttaccttggctcattagtgtttaaaaatgtactgatgatgtgcttagagaaattcctggggctttcttcgttgtagatcagaatttcaccagggagtaaaattacctgaaaacgtaagaagttttaaacagcttttcacacaaattagatgcaactgttcccatgtctgagtacttatttaaaagaaaggtaaagattggcctgttagaaaaagcataatgtgagctttggattactggattttttttttttttaaacacacctggagaggacatttgaaaacactgttcttaccctcgaaccctgatgtggttccattatgtaaatatttcaaatattaaaaatgtatatatttgatcctggggactcatattctttcagaatcatgtaaataaatggcatcatgttgtaa

SEQ ID NO: 39 - protein, 843 aa, Homo sapiens
  ref <308>: DATABASE ACCESSION NUMBER: NCBI / NP_067062.1
  ref <309>: DATABASE ENTRY DATE: 2010-08-14
  ref <313>: RELEVANT RESIDUES IN SEQ ID NO: (1)..(843)
MSFPPHLNRPPMGIPALPPGIPPPQFPGFPPPVPPGTPMIPVPMSIMAPAPTVLVPTVSMVGKHLGARKDHPGLKAKENDENCGPTTTVFVGNISEKASDMLIRQLLAKCGLVLSWKRVQGASGKLQAFGFCEYKEPESTLRALRLLHDLQIGEKKLLVKVDAKTKAQLDEWKAKKKASNGNARPETVTNDDEEALDEETKRRDQMIKGAIEVLIREYSSELNAPSQESDSHPRKKKKEKKEDIFRRFPVAPLIPYPLITKEDINAIEMEEDKRDLISREISKFRDTHKKLEEEKGKKEKERQEIEKERRERERERERERERREREREREREREREKEKERERERERDRDRDRTKERDRDRDRERDRDRDRERSSDRNKDRSRSREKSRDREREREREREREREREREREREREREREREREREREKDKKRDREEDEEDAYERRKLERKLREKEAAYQERLKNWEIRERKKTREYEKEAEREEERRREMAKEAKRLKEFLEDYDDDRDDPKYYRGSALQKRLRDREKEMEADERDRKREKEELEEIRQRLLAEGHPDPDAELQRMEQEAERRRQPQIKQEPESEEEEEEKQEKEEKREEPMEEEEEPEQKPCLKPTLRPISSAPSVSSASGNATPNTPGDESPCGIIIPHENSPDQQQPEEHRPKIGLSLKLGASNSPGQPNSVKRKKLPVDSVFNKFEDEDSDDVPRKRKLVPLDYGEDDKNATKGTVNTEEKRKHIKSLIEKIPTAKPELFAYPLDWSIVDSILMERRIRPWINKKIIEYIGEEEATLVDFVCSKVMAHSSPQSILDDVAMVLDEEAEVFIVKMWRLLIYETEAKKIGLVK

SEQ ID NO: 40 - DNA, 4665 bp, Homo sapiens
  ref <308>: DATABASE ACCESSION NUMBER: NCBI / NM_004836.5
  ref <309>: DATABASE ENTRY DATE: 2011-10-16
  ref <313>: RELEVANT RESIDUES IN SEQ ID NO: (1)..(4665)
ggaaagtccaccttccccaacaaggccagcctgggaacatggagtggcagcggccgcagccaatgagagagcaaacgcgcggaaagtttgctcaatgggcgatgtccgagataggctgtcactcaggtggcagcggcagaggccgggctgagacgtggccaggggaacacggctggctgtccaggccgtcggggcggcagtagggtccctagcacgtccttgccttcttgggagctccaagcggcgggagaggcaggcgtcagtggctgcgcctccatgcctgcgcgcggggcgggacgctgatggagcgcgccatcagcccggggctgctggtacgggcgctgctgctgctgctgctgctgctggggctcgcggcaaggacggtggccgcggggcgcgcccgtggcctcccagcgccgacggcggaggcggcgttcggcctcggggcggccgctgctcccacctcagcgacgcgagtaccggcggcgggcgccgtggctgcggccgaggtgactgtggaggacgctgaggcgctgccggcagccgcgggagagcaggagcctcggggtccggaaccagacgatgagacagagttgcgaccgcgcggcaggtcattagtaattatcagcactttagatgggagaattgctgccttggatcctgaaaatcatggtaaaaagcagtgggatttggatgtgggatccggttccttggtgtcatccagccttagcaaaccagaggtatttgggaataagatgatcattccttccctggatggagccctcttccagtgggaccaagaccgtgaaagcatggaaacagttcctttcacagttgaatcacttcttgaatcttcttataaatttggagatgatgttgttttggttggaggaaaatctctgactacatatggactcagtgcatatagtggaaaggtgaggtatatctgttcagctctgggttgtcgccaatgggatagtgacgaaatggaacaagaggaagacatcctgcttctacagcgtacccaaaaaactgttagagctgtcggacctcgcagtggcaatgagaagtggaatttcagtgttggccactttgaacttcggtatattccagacatggaaacgagagccggatttattgaaagcacctttaagcccaatgagaacacagaagagtctaaaattatttcagatgtggaagaacaggaagctgccataatggacatagtgataaaggtttcggttgctgactggaaagttatggcattcagtaagaagggaggacatctggaatgggagtaccagttttgtactccaattgcatctgcctggttacttaaggatgggaaagtcattcccatcagtctttttgatgatacaagttatacatctaatgatgatgttttagaagatgaagaagacattgtagaagctgccagaggagccacagaaaacagtgtttacttgggaatgtatagaggccagctgtatctgcagtcatcagtcagaatttcagaaaagtttccttcaagtcccaaggctttggaatctgtcactaatgaaaacgcaattattcctttaccaacaatcaaatggaaacccttaattcattctccttccagaactcctgtcttggtaggatctgatgaatttgacaaatgtctcagtaatgataagttttctcatgaagaatatagtaatggtgcactttcaatcttgcagtatccatatgataatggttattatctaccatactacaagagggagaggaacaaacgaagcacacagattacagtcagattcctcgacaacccacattacaacaagaatatccgcaaaaaggatcctgttcttcttttacactggtggaaagaaatagttgcaacgattttgttttgtatcatagcaacaacgtttattgtgcgcaggcttttccatcctcatcctcacaggcaaaggaaggagtctgaaactcagtgtcaaactgaaaataaatatgattctgtaagtggtgaagccaatgacagtagctggaatgacataaaaaactctggatatatatcacgatatctaactgattttgagccaattcaatgcctgggacgtggtggctttggagttgtttttgaagctaaaaacaaagtagatgactgcaattatgctatcaagaggatccgtctccccaatagggaattggctcgggaaaaggtaatgcgagaagttaaagccttagccaagcttgaacacccgggcattgttagatatttcaatgcctggctcgaagcaccaccagagaagtggcaagaaaagatggatgaaatttggctgaaagatgaaagcacagactggccactcagctctcctagcccaatggatgcaccatcagttaaaatacgcagaatggatcctttcgctacaaaagaacatattgaaatcatagctccttcaccacaaagaagcaggtctttttcagtagggatttcctgtgaccagacaagttcatctgagagccagttctcaccactggaattctcaggaatggaccatgaggacatcagtgagtcagtggatgcagcatacaacctccaggacagttgccttacagactgtgatgtggaagatgggactatggatggcaatgatgaggggcactcctttgaactttgtccttctgaagcttctccttatgtaaggtcaagggagagaacctcctcttcaatagtatttgaagattctggctgtgataatgcttccagtaaagaagagccgaaaactaatcgattgcatattggcaaccattgtgctaataaactaactgctttcaagcccaccagtagcaaatcttcttctgaagctacattgtctatttctcctccaagaccaaccactttaagtttagatctcactaaaaacaccacagaaaaactccagcccagttcaccaaaggtgtatctttacattcaaatgcagctgtgcagaaaagaaaacctcaaagactggatgaatggacgatgtaccatagaggagagagagaggagcgtgtgtctgcacatcttcctgcagatcgcagaggcagtggagtttcttcacagtaaaggactgatgcacagggacctcaagccatccaacatattctttacaatggatgatgtggtcaaggttggagactttgggttagtgactgcaatggaccaggatgaggaagagcagacggttctgaccccaatgccagcttatgccagacacacaggacaagtagggaccaaactgtatatgagcccagagcagattcatggaaacagctattctcataaagtggacatcttttctttaggcctgattctatttgaattgctgtatccattcagcactcagatggagagagtcaggaccttaactgatgtaagaaatctcaaatttccaccattatttactcagaaatatccttgtgagtacgtgatggttcaagacatgctctctccatcccccatggaacgacctgaagctataaacatcattgaaaatgctgtatttgaggacttggactttccaggaaaaacagtgctcagacagaggtctcgctccttgagttcatcgggaacaaaacattcaagacagtccaacaactcccatagccctttgccaagcaattagccttaagttgtgctagcaaccctaataggtgatgcagataatagcctacttcttagaatatgcctgtccaaaattgcagacttgaaaagtttgttcttcgctcaatttttttgtggactactttttttatatcaaatttaagctggatttgggggcataacctaatttgagccaactcctgagttttgctatacttaaggaaagggctatctttgttctttgttagtctcttgaaactggctgctggccaagctttatagccctcaccatttgcctaaggaggtagcagcaatccctaatatatatatatagtgagaactaaaatggatatatttttataatgcagaagaaggaaagtccccctgtgtggtaactgtattgttctagaaatatgctttctagagatatgatgattttgaaactgatttctagaaaaagctgactccatttttgtccctggcgggtaaattaggaatctgcactattttggaggacaagtagcacaaactgtataacggtttatgtccgtagttttatagtcctatttgtagcattcaatagctttattccttagatggttctagggtgggtttacagctttttgtacttttacctccaataaagggaaaatgaagctttttatgtaaattggttgaaaggtctagttttgggaggaaaaaagccgtagtaagaaatggatcatatatattacaactaacttcttcaactatggactttttaagcctaatgaaatcttaagtgtcttatatgtaatcctgtaggttggtacttcccccaaactgattataggtaacagtttaatcatctcacttgctaacatgtttttatttttcactgtaaatatgtttatgttttatttataaaaattctgaaatcaatccatttgggttggtggtgtacagaacacacttaagtgtgttaacttgtgacttctttcaagtctaaatgatttaataaaactttttttaaattaaaaaaaaaaaaaaaaaaa

SEQ ID NO: 41 - protein, 1116 aa, Homo sapiens
  ref <308>: DATABASE ACCESSION NUMBER: NCBI / NP_004827.4
  ref <309>: DATABASE ENTRY DATE: 2011-10-16
  ref <313>: RELEVANT RESIDUES IN SEQ ID NO: (1)..(1116)
MERAISPGLLVRALLLLLLLLGLAARTVAAGRARGLPAPTAEAAFGLGAAAAPTSATRVPAAGAVAAAEVTVEDAEALPAAAGEQEPRGPEPDDETELRPRGRSLVIISTLDGRIAALDPENHGKKQWDLDVGSGSLVSSSLSKPEVFGNKMIIPSLDGALFQWDQDRESMETVPFTVESLLESSYKFGDDVVLVGGKSLTTYGLSAYSGKVRYICSALGCRQWDSDEMEQEEDILLLQRTQKTVRAVGPRSGNEKWNFSVGHFELRYIPDMETRAGFIESTFKPNENTEESKIISDVEEQEAAIMDIVIKVSVADWKVMAFSKKGGHLEWEYQFCTPIASAWLLKDGKVIPISLFDDTSYTSNDDVLEDEEDIVEAARGATENSVYLGMYRGQLYLQSSVRISEKFPSSPKALESVTNENAIIPLPTIKWKPLIHSPSRTPVLVGSDEFDKCLSNDKFSHEEYSNGALSILQYPYDNGYYLPYYKRERNKRSTQITVRFLDNPHYNKNIRKKDPVLLLHWWKEIVATILFCIIATTFIVRRLFHPHPHRQRKESETQCQTENKYDSVSGEANDSSWNDIKNSGYISRYLTDFEPIQCLGRGGFGVVFEAKNKVDDCNYAIKRIRLPNRELAREKVMREVKALAKLEHPGIVRYFNAWLEAPPEKWQEKMDEIWLKDESTDWPLSSPSPMDAPSVKIRRMDPFATKEHIEIIAPSPQRSRSFSVGISCDQTSSSESQFSPLEFSGMDHEDISESVDAAYNLQDSCLTDCDVEDGTMDGNDEGHSFELCPSEASPYVRSRERTSSSIVFEDSGCDNASSKEEPKTNRLHIGNHCANKLTAFKPTSSKSSSEATLSISPPRPTTLSLDLTKNTTEKLQPSSPKVYLYIQMQLCRKENLKDWMNGRCTIEERERSVCLHIFLQIAEAVEFLHSKGLMHRDLKPSNIFFTMDDVVKVGDFGLVTAMDQDEEEQTVLTPMPAYARHTGQVGTKLYMSPEQIHGNSYSHKVDIFSLGLILFELLYPFSTQMERVRTLTDVRNLKFPPLFTQKYPCEYVMVQDMLSPSPMERPEAINIIENAVFEDLDFPGKTVLRQRSRSLSSSGTKHSRQSNNSHSPLPSN

SEQ ID NO: 42 - protein, 192 aa, Homo sapiens
  ref <308>: DATABASE ACCESSION NUMBER: NCBI / NP_001181982.1
  ref <309>: DATABASE ENTRY DATE: 2011-10-23
  ref <313>: RELEVANT RESIDUES IN SEQ ID NO: (1)..(192)
MELVPATPHYPADVLFQTDPTAEMAAESLPFSFGTLSSWELEAWYEDLQEVLSSDENGGTYVSPPGNEEEESKIFTTLDPASLAWLTEEEPEPAEVTSTSQSPHSPDSSQSSLAQEEEEEDQGRTRKRKQSGHSPARAGKQRMKEKEQENERKVAQLAEENERLKQEIERLTREVEATRRALIDRMVNLHQA

SEQ ID NO: 43 - protein, 192 aa, Homo sapiens; identical to SEQ ID NO: 42
  ref <308>: DATABASE ACCESSION NUMBER: NCBI / NP_001181983.1
  ref <309>: DATABASE ENTRY DATE: 2011-10-23
  ref <313>: RELEVANT RESIDUES IN SEQ ID NO: (1)..(192)

SEQ ID NO: 44 - protein, 192 aa, Homo sapiens; identical to SEQ ID NO: 42
  ref <308>: DATABASE ACCESSION NUMBER: NCBI / NP_001181984.1
  ref <309>: DATABASE ENTRY DATE: 2011-10-23
  ref <313>: RELEVANT RESIDUES IN SEQ ID NO: (1)..(192)

SEQ ID NO: 45 - protein, 192 aa, Homo sapiens; identical to SEQ ID NO: 42
  ref <308>: DATABASE ACCESSION NUMBER: NCBI / NP_001181985.1,
  ref <309>: DATABASE ENTRY DATE: 2011-10-23
  ref <313>: RELEVANT RESIDUES IN SEQ ID NO: (1)..(192)

SEQ ID NO: 46 - protein, 169 aa, Homo sapiens
  ref <308>: DATABASE ACCESSION NUMBER: NCBI / NP_001181986.1
  ref <309>: DATABASE ENTRY DATE: 2011-10-23
  ref <313>: RELEVANT RESIDUES IN SEQ ID NO: (1)..(169)
MAAESLPFSFGTLSSWELEAWYEDLQEVLSSDENGGTYVSPPGNEEEESKIFTTLDPASLAWLTEEEPEPAEVTSTSQSPHSPDSSQSSLAQEEEEEDQGRTRKRKQSGHSPARAGKQRMKEKEQENERKVAQLAEENERLKQEIERLTREVEATRRALIDRMVNLHQA

SEQ ID NO: 47 - protein, 169 aa, Homo sapiens; identical to SEQ ID NO: 46
  ref <308>: DATABASE ACCESSION NUMBER: NCBI / NP_004074.2
  ref <309>: DATABASE ENTRY DATE: 2011-10-23
  ref <313>: RELEVANT RESIDUES IN SEQ ID NO: (1)..(169)

SEQ ID NO: 48 - DNA, 1081 bp, Homo sapiens
  ref <308>: DATABASE ACCESSION NUMBER: NCBI / NM_001195053.1
  ref <309>: DATABASE ENTRY DATE: 2011-10-23
  ref <313>: RELEVANT RESIDUES IN SEQ ID NO: (1)..(1081)
gaggtcagagacttaagtctaaggcactgagcgtatcatgttaaagatgagcgggtggcagcgacagagccaaaatcagagctggaacctgaggagagagtgttcaagaaggaagtgtatcttcatacatcaccacacctgaaagcagcaccaaagcagccataaacaatatgtaaataaacagatgtggctgtattccagtacaactttacctacaaaaacaggcatcagaccagcttgccaacttgtggcatagactgtttgctacatggagcttgttccagccactccccattatcctgcagatgtgcttttccagactgatccaactgcagagatggcagctgagtcattgcctttctccttcgggacactgtccagctgggagctggaagcctggtatgaggacctgcaagaggtcctgtcttcagatgaaaatgggggtacctatgtttcacctcctggaaatgaagaggaagaatcaaaaatcttcaccactcttgaccctgcttctctggcttggctgactgaggaggagccagaaccagcagaggtcacaagcacctcccagagccctcactctccagattccagtcagagctccctggctcaggaggaagaggaggaagaccaagggagaaccaggaaacggaaacagagtggtcattccccagcccgggctggaaagcagcgcatgaaggagaaagaacaggagaatgaaaggaaagtggcacagctagctgaagagaatgaacggctcaagcaggaaatcgagcgcctgaccagggaagtagaggcgactcgccgagctctgattgaccgaatggtgaatctgcaccaagcatgaacaattgggagcatcagtcccccacttgggccacactacccacctttcccagaagtggctactgactaccctctcactagtgccaatgatgtgaccctcaatcccacatacgcagggggaaggcttggagtagacaaaaggaaaggtctcagcttgtatatagagattgtacatttatttattactgtccctatctattaaagtgactttctatgagccaaaaaaaaaaaaaaa

SEQ ID NO: 49 - DNA, 1028 bp, Homo sapiens
  ref <308>: DATABASE ACCESSION NUMBER: NCBI / NM_001195054.1
  ref <309>: DATABASE ENTRY DATE: 2011-10-23
  ref <313>: RELEVANT RESIDUES IN SEQ ID NO: (1)..(1028)
gaggtcagagacttaagtctaaggcactgagcgtatcatgttaaagatgagcgggtggcagcgacagagccaaaatcagagctggaacctgaggagagagtgttcaagaaggaagtgtatcttcatacatcaccacacctgaaagcagtacaactttacctacaaaaacaggcatcagaccagcttgccaacttgtggcatagactgtttgctacatggagcttgttccagccactccccattatcctgcagatgtgcttttccagactgatccaactgcagagatggcagctgagtcattgcctttctccttcgggacactgtccagctgggagctggaagcctggtatgaggacctgcaagaggtcctgtcttcagatgaaaatgggggtacctatgtttcacctcctggaaatgaagaggaagaatcaaaaatcttcaccactcttgaccctgcttctctggcttggctgactgaggaggagccagaaccagcagaggtcacaagcacctcccagagccctcactctccagattccagtcagagctccctggctcaggaggaagaggaggaagaccaagggagaaccaggaaacggaaacagagtggtcattccccagcccgggctggaaagcagcgcatgaaggagaaagaacaggagaatgaaaggaaagtggcacagctagctgaagagaatgaacggctcaagcaggaaatcgagcgcctgaccagggaagtagaggcgactcgccgagctctgattgaccgaatggtgaatctgcaccaagcatgaacaattgggagcatcagtcccccacttgggccacactacccacctttcccagaagtggctactgactaccctctcactagtgccaatgatgtgaccctcaatcccacatacgcagggggaaggcttggagtagacaaaaggaaaggtctcagcttgtatatagagattgtacatttatttattactgtccctatctattaaagtgactttctatgagccaaaaaaaaaaaaaaa

SEQ ID NO: 50 - DNA, 1005 bp, Homo sapiens
  ref <308>: DATABASE ACCESSION NUMBER: NCBI / NM_001195055.1
  ref <309>: DATABASE ENTRY DATE: 2011-10-23
  ref <313>: RELEVANT RESIDUES IN SEQ ID NO: (1)..(1005)
gaggtcagagacttaagtctaaggcactgagcgtatcatgttaaagatgagcgggtggcagcgacagagccaaaatcagagctggaacctgaggagagagtgttcaagaaggaagtgtatcttcatacatcaccacacctgaaagcaggcatcagaccagcttgccaacttgtggcatagactgtttgctacatggagcttgttccagccactccccattatcctgcagatgtgcttttccagactgatccaactgcagagatggcagctgagtcattgcctttctccttcgggacactgtccagctgggagctggaagcctggtatgaggacctgcaagaggtcctgtcttcagatgaaaatgggggtacctatgtttcacctcctggaaatgaagaggaagaatcaaaaatcttcaccactcttgaccctgcttctctggcttggctgactgaggaggagccagaaccagcagaggtcacaagcacctcccagagccctcactctccagattccagtcagagctccctggctcaggaggaagaggaggaagaccaagggagaaccaggaaacggaaacagagtggtcattccccagcccgggctggaaagcagcgcatgaaggagaaagaacaggagaatgaaaggaaagtggcacagctagctgaagagaatgaacggctcaagcaggaaatcgagcgcctgaccagggaagtagaggcgactcgccgagctctgattgaccgaatggtgaatctgcaccaagcatgaacaattgggagcatcagtcccccacttgggccacactacccacctttcccagaagtggctactgactaccctctcactagtgccaatgatgtgaccctcaatcccacatacgcagggggaaggcttggagtagacaaaaggaaaggtctcagcttgtatatagagattgtacatttatttattactgtccctatctattaaagtgactttctatgagccaaaaaaaaaaaaaaa

SEQ ID NO: 51 - DNA, 1191 bp, Homo sapiens
  ref <308>: DATABASE ACCESSION NUMBER: NCBI / NM_001195056.1
  ref <309>: DATABASE ENTRY DATE: 2011-10-23
  ref <313>: RELEVANT RESIDUES IN SEQ ID NO: (1)..(1191)
gaggtcagagacttaagtctaaggcactgagcgtatcatgttaaagatgagcgggtggcagcgacagagccaaaatcagagctggaacctgaggagagagtgttcaagaaggaagtgtatcttcatacatcaccacacctgaaagcaggtaaacttaacctacccttttccaaaaattttaaacggcaggacagtaaatattttagatgttaaaagtcctatagtctctagcgtgactcttcatctctgccactgtagcaccaaagcagccataaacaatatgtaaataaacagatgtggctgtattccagtacaactttacctacaaaaacaggcatcagaccagcttgccaacttgtggcatagactgtttgctacatggagcttgttccagccactccccattatcctgcagatgtgcttttccagactgatccaactgcagagatggcagctgagtcattgcctttctccttcgggacactgtccagctgggagctggaagcctggtatgaggacctgcaagaggtcctgtcttcagatgaaaatgggggtacctatgtttcacctcctggaaatgaagaggaagaatcaaaaatcttcaccactcttgaccctgcttctctggcttggctgactgaggaggagccagaaccagcagaggtcacaagcacctcccagagccctcactctccagattccagtcagagctccctggctcaggaggaagaggaggaagaccaagggagaaccaggaaacggaaacagagtggtcattccccagcccgggctggaaagcagcgcatgaaggagaaagaacaggagaatgaaaggaaagtggcacagctagctgaagagaatgaacggctcaagcaggaaatcgagcgcctgaccagggaagtagaggcgactcgccgagctctgattgaccgaatggtgaatctgcaccaagcatgaacaattgggagcatcagtcccccacttgggccacactacccacctttcccagaagtggctactgactaccctctcactagtgccaatgatgtgaccctcaatcccacatacgcagggggaaggcttggagtagacaaaaggaaaggtctcagcttgtatatagagattgtacatttatttattactgtccctatctattaaagtgactttctatgagccaaaaaaaaaaaaaaa

SEQ ID NO: 52 - DNA, 910 bp, Homo sapiens
  ref <308>: DATABASE ACCESSION NUMBER: NCBI / NM_001195057.1
  ref <309>: DATABASE ENTRY DATE: 2011-10-23
  ref <313>: RELEVANT RESIDUES IN SEQ ID NO: (1)..(910)
gaggtcagagacttaagtctaaggcactgagcgtatcatgttaaagatgagcgggtggcagcgacagagccaaaatcagagctggaacctgaggagagagtgttcaagaaggaagtgtatcttcatacatcaccacacctgaaagcagactgatccaactgcagagatggcagctgagtcattgcctttctccttcgggacactgtccagctgggagctggaagcctggtatgaggacctgcaagaggtcctgtcttcagatgaaaatgggggtacctatgtttcacctcctggaaatgaagaggaagaatcaaaaatcttcaccactcttgaccctgcttctctggcttggctgactgaggaggagccagaaccagcagaggtcacaagcacctcccagagccctcactctccagattccagtcagagctccctggctcaggaggaagaggaggaagaccaagggagaaccaggaaacggaaacagagtggtcattccccagcccgggctggaaagcagcgcatgaaggagaaagaacaggagaatgaaaggaaagtggcacagctagctgaagagaatgaacggctcaagcaggaaatcgagcgcctgaccagggaagtagaggcgactcgccgagctctgattgaccgaatggtgaatctgcaccaagcatgaacaattgggagcatcagtcccccacttgggccacactacccacctttcccagaagtggctactgactaccctctcactagtgccaatgatgtgaccctcaatcccacatacgcagggggaaggcttggagtagacaaaaggaaaggtctcagcttgtatatagagattgtacatttatttattactgtccctatctattaaagtgactttctatgagccaaaaaaaaaaaaaaa

SEQ ID NO: 53 - DNA, 924 bp, Homo sapiens
  ref <308>: DATABASE ACCESSION NUMBER: NCBI / NM_004083.5
  ref <309>: DATABASE ENTRY DATE: 2011-10-23
  ref <313>: RELEVANT RESIDUES IN SEQ ID NO: (1)..(924)
gaggtcagagacttaagtctaaggcactgagcgtatcatgttaaagatgagcgggtggcagcgacagagccaaaatcagagctggaacctgaggagagagtgttcaagaaggaagtgtatcttcatacatcaccacacctgaaagcagatgtgcttttccagactgatccaactgcagagatggcagctgagtcattgcctttctccttcgggacactgtccagctgggagctggaagcctggtatgaggacctgcaagaggtcctgtcttcagatgaaaatgggggtacctatgtttcacctcctggaaatgaagaggaagaatcaaaaatcttcaccactcttgaccctgcttctctggcttggctgactgaggaggagccagaaccagcagaggtcacaagcacctcccagagccctcactctccagattccagtcagagctccctggctcaggaggaagaggaggaagaccaagggagaaccaggaaacggaaacagagtggtcattccccagcccgggctggaaagcagcgcatgaaggagaaagaacaggagaatgaaaggaaagtggcacagctagctgaagagaatgaacggctcaagcaggaaatcgagcgcctgaccagggaagtagaggcgactcgccgagctctgattgaccgaatggtgaatctgcaccaagcatgaacaattgggagcatcagtcccccacttgggccacactacccacctttcccagaagtggctactgactaccctctcactagtgccaatgatgtgaccctcaatcccacatacgcagggggaaggcttggagtagacaaaaggaaaggtctcagcttgtatatagagattgtacatttatttattactgtccctatctattaaagtgactttctatgagccaaaaaaaaaaaaaaa

SEQ ID NO: 54 - protein, 592 aa, Homo sapiens
  ref <308>: DATABASE ACCESSION NUMBER: NCBI / NP_001019820.1
  ref <309>: DATABASE ENTRY DATE: 2011-10-23
  ref <313>: RELEVANT RESIDUES IN SEQ ID NO: (1)..(592)
MEGKWLLCMLLVLGTAIVEAHDGHDDDVIDIEDDLDDVIEEVEDSKPDTTAPPSSPKVTYKAPVPTGEVYFADSFDRGTLSGWILSKAKKDDTDDEIAKYDGKWEVEEMKESKLPGDKGLVLMSRAKHHAISAKLNKPFLFDTKPLIVQYEVNFQNGIECGGAYVKLLSKTPELNLDQFHDKTPYTIMFGPDKCGEDYKLHFIFRHKNPKTGIYEEKHAKRPDADLKTYFTDKKTHLYTLILNPDNSFEILVDQSVVNSGNLLNDMTPPVNPSREIEDPEDRKPEDWDERPKIPDPEAVKPDDWDEDAPAKIPDEEATKPEGWLDDEPEYVPDPDAEKPEDWDEDMDGEWEAPQIANPRCESAPGCGVWQRPVIDNPNYKGKWKPPMIDNPSYQGIWKPRKIPNPDFFEDLEPFRMTPFSAIGLELWSMTSDIFFDNFIICADRRIVDDWANDGWGLKKAADGAAEPGVVGQMIEAAEERPWLWVVYILTVALPVFLVILFCCSGKKQTSGMEYKKTDAPQPDVKEEEEEKEEEKDKGDEEEEGEEKLEEKQKSDAEEDGGTVSQEEEDRKPKAEEDEILNRSPRNRKPRRE

SEQ ID NO: 55 - protein, 592 aa, Homo sapiens; identical to SEQ ID NO: 54
  ref <308>: DATABASE ACCESSION NUMBER: NCBI / NP_001737.1
  ref <309>: DATABASE ENTRY DATE: 2011-10-23
  ref <313>: RELEVANT RESIDUES IN SEQ ID NO: (1)..(592)

SEQ ID NO: 56 - DNA, 4900 bp, Homo sapiens
  ref <308>: DATABASE ACCESSION NUMBER: NCBI / NM_001024649.1
  ref <309>: DATABASE ENTRY DATE: 2011-10-23
  ref <313>: RELEVANT RESIDUES IN SEQ ID NO: (1)..(4900)
agggccgggcttcgtgcggtggggctcgctcgcgcggcagcggtggccgaggcctcttggttctgcggcacgtgacggtcgggccgcctccgcctctctctttactgcggcgcggggcaagatcatggaagggaagtggttgctgtgtatgttactggtgcttggaactgctattgttgaggctcatgatggacatgatgatgatgtgattgatattgaggatgaccttgacgatgtcattgaagaggtagaagactcaaaaccagataccactgctcctccttcatctcccaaggttacttacaaagctccagttccaacaggggaagtatattttgctgattcttttgacagaggaactctgtcagggtggattttatccaaagccaagaaagacgataccgatgatgaaattgccaaatatgatggaaagtgggaggtagaggaaatgaaggagtcaaagcttccaggtgataaaggacttgtgttgatgtctcgggccaagcatcatgccatctctgctaaactgaacaagcccttcctgtttgacaccaagcctctcattgttcagtatgaggttaatttccaaaatggaatagaatgtggtggtgcctatgtgaaactgctttctaaaacaccagaactcaacctggatcagttccatgacaagaccccttatacgattatgtttggtccagataaatgtggagaggactataaactgcacttcatcttccgacacaaaaaccccaaaacgggtatctatgaagaaaaacatgctaagaggccagatgcagatctgaagacctattttactgataagaaaacacatctttacacactaatcttgaatccagataatagttttgaaatactggttgaccaatctgtggtgaatagtggaaatctgctcaatgacatgactcctcctgtaaatccttcacgtgaaattgaggacccagaagaccggaagcccgaggattgggatgaaagaccaaaaatcccagatccagaagctgtcaagccagatgactgggatgaagatgcccctgctaagattccagatgaagaggccacaaaacccgaaggctggttagatgatgagcctgagtacgtacctgatccagacgcagagaaacctgaggattgggatgaagacatggatggagaatgggaggctcctcagattgccaaccctagatgtgagtcagctcctggatgtggtgtctggcagcgacctgtgattgacaaccccaattataaaggcaaatggaagcctcctatgattgacaatcccagttaccagggaatctggaaacccaggaaaataccaaatccagatttctttgaagatctggaacctttcagaatgactccttttagtgctattggtttggagctgtggtccatgacctctgacattttttttgacaactttatcatttgtgctgatcgaagaatagttgatgattgggccaatgatggatggggcctgaagaaagctgctgatggggctgctgagccaggcgttgtggggcagatgatcgaggcagctgaagagcgcccgtggctgtgggtagtctatattctaactgtagcccttcctgtgttcctggttatcctcttctgctgttctggaaagaaacagaccagtggtatggagtataagaaaactgatgcacctcaaccggatgtgaaggaagaggaagaagagaaggaagaggaaaaggacaagggagatgaggaggaggaaggagaagagaaacttgaagagaaacagaaaagtgatgctgaagaagatggtggcactgtcagtcaagaggaggaagacagaaaacctaaagcagaggaggatgaaattttgaacagatcaccaagaaacagaaagccacgaagagagtgaaacaatcttaagagcttgatctgtgatttcttctccctcctcccctgcaagagtggtcctaggagaggacctggcacaccttaggttgacattcagaaaacttcaagacatcaccatcagcaggctccagttgaacactagtctgtgtaactttaaacatctagcagtaaatacttgcagttgtgatataaaggaccctgtttctgtagaaaagaaaacatttaacataatggttgtgaaatgtaacatgaagcaaactaacttttttttttttaacatctttgtttttaaaatagaatgatagaactttgccagtctttaagatcttggcttaatttaatgtattaatctgtttgtgcaaacataataccaccatttaaaaatgttagggagatgagttgcagtttttataatagattttttttaaagtttggtattgtaaaacattcacacctctgtccctcaaaattgataattacgtttaaagtgcagtcatttgtggttagaatcttgttttgtttgcttccattattgagttcctcctaaggaaattgaggagagggactgaatagaagcccaaattcatataaaagttgcgtttaagttgtattaaaaatagatatataagaaaaaattctttcacttgatgtttgttagaccagaaagtgtgtgtgttctgtagctcagttcccagacagctttttaggtagtggaggaggtggcttcatgtggcacttgggcatttatattccacttgggagggtcaggctgtggccttctggagcaggtggcttgttaaggaatgctagcagggcatggcacgtgagctccggaatagatgtcttcatcacttcttccactgtgtgttgacactgttttccttacctatttcctcagatccccagctttctcctctgctatgcattttcttcacagtgcagcttgcagtccgttgctgaaaatgattataagccctgcataatgttaagctttattgtgattacgtgtatgtttcttctttcttttaagcagacccatacctttccagggtcaaagtacagaatagaatacattgatacaaagtacagaaaaatactttgatttttatccatttcttttactctgtgtaaagacttgagaagtctaattcacaggcaaaccaatacagaattgactgcagttgaacagactagaagtatttgtgggaggagtgacatgaagcatgagttatctgattttttttgtagctgctatatattttaagccttcatttgcaattcatgtaacagttgtgtcataaattacacaataaagcagtcctgttcaaatttttttttaacgtggcttgtagaatttttaaaaaagtgatcttaggtttgttttttcatgcgggatgcagatgggtgctatcagagcctctcccacaccactatagtgtaataatgttattattactctacactgaaacgtattcagagttagatattattttagcttcagttgttctttagaggctttcaaatgtaccgatgatactgtttcttgcactgaatatataaacactccacagtgtttatattgggaagatattgggaaggaaatatatttgtaaaagatgaaggctgtatctatttttttttctttttaaagtttgttcacttaaattcttttgaggatgggatgtatttttcttgctgttcagtgctttttccttttcatctgttgttctgtggtcacagtgaccttagctacatagcagactttcccaaatgtattgattacaaataaacagttgttacttagcaagacctgaaaatatgtctgcaggtttctccttgaagcaaatgtgtgggatcattgcatttccagaaatctgcctccttcaccctccgttgacagtatatgtcatgcctcactttcttctagctgagctttaaatcattagagcttaaattgtcagatcgttcattgcctttccagggttatttagtaaagtttgttgaaaacaaaaacgccttttcttggttcttttttcagttattttgaaggtccagcatcctgattaaatgtctgacacattaatgaatgaccagcagcagctttcagctcttaaaaagacacttatattttgattttacatgctggttacctgttccattgttgtcaaatgcccactctccatcagatgtgttcctccattttcttatccacaaagtactcctcacttttcaatttgtcatgttactaaatggtgttacattaaagccctgtgttaagtgtctgcttttgactgaatttcttcatagtaaccttcagtgtgtgtgtgtgactatgttcaattagtgggttgatcttcgtataattggccactatgtgagagttcactactaggcagaaactattatggacagtgaaataatgacttttatctcaccacgtgagtttgatgcagtcttttctgtctagcccttgcctcttcctgcccatgtgattgcggtgcagtagtttctgttgtataatagtgtggacagcagctcagaaaaggagggaatgctactgataatttgtagataatattctttaagacttaggggaaccattgaactttgaaatttttattagaaaattatttgttcagaatcagactccattattttacatatacttaaatactttaggggtatttttgaaagttagcccagttttttatgtgctattaaatttttagattacatactaaagaaaagtatgtacacagaatgtagtgctcctagttactattttttctattaagaaatagtttagttctggtgtaaaatttgtttgaatgctaaaaaaaaaaaagcaggactgcattatggcacttttgccttggtggcccactttctccatttaaaacattaggatttgtatttttctgctgcgtttgtatgaagacatatttgattgttgttttctcttgattttaaaataaaacctcatgagccctagtaaaaa

SEQ ID NO: 57 - DNA, 4953 bp, Homo sapiens
  ref <308>: DATABASE ACCESSION NUMBER: NCBI / NM_001746.3
  ref <309>: DATABASE ENTRY DATE: 2011-10-23
  ref <313>: RELEVANT RESIDUES IN SEQ ID NO: (1)..(4953)
agggccgggcttcgtgcggtggggctcgctcgcgcggcagcggtggccgaggcctcttggttctgcggcacgtgacggtcgggccgcctccgcctctctctttactgcggcgcggggcaaggtgtgcgggcgggaaggggcacgggcacccccgcggtccccgggaggctagagatcatggaagggaagtggttgctgtgtatgttactggtgcttggaactgctattgttgaggctcatgatggacatgatgatgatgtgattgatattgaggatgaccttgacgatgtcattgaagaggtagaagactcaaaaccagataccactgctcctccttcatctcccaaggttacttacaaagctccagttccaacaggggaagtatattttgctgattcttttgacagaggaactctgtcagggtggattttatccaaagccaagaaagacgataccgatgatgaaattgccaaatatgatggaaagtgggaggtagaggaaatgaaggagtcaaagcttccaggtgataaaggacttgtgttgatgtctcgggccaagcatcatgccatctctgctaaactgaacaagcccttcctgtttgacaccaagcctctcattgttcagtatgaggttaatttccaaaatggaatagaatgtggtggtgcctatgtgaaactgctttctaaaacaccagaactcaacctggatcagttccatgacaagaccccttatacgattatgtttggtccagataaatgtggagaggactataaactgcacttcatcttccgacacaaaaaccccaaaacgggtatctatgaagaaaaacatgctaagaggccagatgcagatctgaagacctattttactgataagaaaacacatctttacacactaatcttgaatccagataatagttttgaaatactggttgaccaatctgtggtgaatagtggaaatctgctcaatgacatgactcctcctgtaaatccttcacgtgaaattgaggacccagaagaccggaagcccgaggattgggatgaaagaccaaaaatcccagatccagaagctgtcaagccagatgactgggatgaagatgcccctgctaagattccagatgaagaggccacaaaacccgaaggctggttagatgatgagcctgagtacgtacctgatccagacgcagagaaacctgaggattgggatgaagacatggatggagaatgggaggctcctcagattgccaaccctagatgtgagtcagctcctggatgtggtgtctggcagcgacctgtgattgacaaccccaattataaaggcaaatggaagcctcctatgattgacaatcccagttaccagggaatctggaaacccaggaaaataccaaatccagatttctttgaagatctggaacctttcagaatgactccttttagtgctattggtttggagctgtggtccatgacctctgacattttttttgacaactttatcatttgtgctgatcgaagaatagttgatgattgggccaatgatggatggggcctgaagaaagctgctgatggggctgctgagccaggcgttgtggggcagatgatcgaggcagctgaagagcgcccgtggctgtgggtagtctatattctaactgtagcccttcctgtgttcctggttatcctcttctgctgttctggaaagaaacagaccagtggtatggagtataagaaaactgatgcacctcaaccggatgtgaaggaagaggaagaagagaaggaagaggaaaaggacaagggagatgaggaggaggaaggagaagagaaacttgaagagaaacagaaaagtgatgctgaagaagatggtggcactgtcagtcaagaggaggaagacagaaaacctaaagcagaggaggatgaaattttgaacagatcaccaagaaacagaaagccacgaagagagtgaaacaatcttaagagcttgatctgtgatttcttctccctcctcccctgcaagagtggtcctaggagaggacctggcacaccttaggttgacattcagaaaacttcaagacatcaccatcagcaggctccagttgaacactagtctgtgtaactttaaacatctagcagtaaatacttgcagttgtgatataaaggaccctgtttctgtagaaaagaaaacatttaacataatggttgtgaaatgtaacatgaagcaaactaacttttttttttttaacatctttgtttttaaaatagaatgatagaactttgccagtctttaagatcttggcttaatttaatgtattaatctgtttgtgcaaacataataccaccatttaaaaatgttagggagatgagttgcagtttttataatagattttttttaaagtttggtattgtaaaacattcacacctctgtccctcaaaattgataattacgtttaaagtgcagtcatttgtggttagaatcttgttttgtttgcttccattattgagttcctcctaaggaaattgaggagagggactgaatagaagcccaaattcatataaaagttgcgtttaagttgtattaaaaatagatatataagaaaaaattctttcacttgatgtttgttagaccagaaagtgtgtgtgttctgtagctcagttcccagacagctttttaggtagtggaggaggtggcttcatgtggcacttgggcatttatattccacttgggagggtcaggctgtggccttctggagcaggtggcttgttaaggaatgctagcagggcatggcacgtgagctccggaatagatgtcttcatcacttcttccactgtgtgttgacactgttttccttacctatttcctcagatccccagctttctcctctgctatgcattttcttcacagtgcagcttgcagtccgttgctgaaaatgattataagccctgcataatgttaagctttattgtgattacgtgtatgtttcttctttcttttaagcagacccatacctttccagggtcaaagtacagaatagaatacattgatacaaagtacagaaaaatactttgatttttatccatttcttttactctgtgtaaagacttgagaagtctaattcacaggcaaaccaatacagaattgactgcagttgaacagactagaagtatttgtgggaggagtgacatgaagcatgagttatctgattttttttgtagctgctatatattttaagccttcatttgcaattcatgtaacagttgtgtcataaattacacaataaagcagtcctgttcaaatttttttttaacgtggcttgtagaatttttaaaaaagtgatcttaggtttgttttttcatgcgggatgcagatgggtgctatcagagcctctcccacaccactatagtgtaataatgttattattactctacactgaaacgtattcagagttagatattattttagcttcagttgttctttagaggctttcaaatgtaccgatgatactgtttcttgcactgaatatataaacactccacagtgtttatattgggaagatattgggaaggaaatatatttgtaaaagatgaaggctgtatctatttttttttctttttaaagtttgttcacttaaattcttttgaggatgggatgtatttttcttgctgttcagtgctttttccttttcatctgttgttctgtggtcacagtgaccttagctacatagcagactttcccaaatgtattgattacaaataaacagttgttacttagcaagacctgaaaatatgtctgcaggtttctccttgaagcaaatgtgtgggatcattgcatttccagaaatctgcctccttcaccctccgttgacagtatatgtcatgcctcactttcttctagctgagctttaaatcattagagcttaaattgtcagatcgttcattgcctttccagggttatttagtaaagtttgttgaaaacaaaaacgccttttcttggttcttttttcagttattttgaaggtccagcatcctgattaaatgtctgacacattaatgaatgaccagcagcagctttcagctcttaaaaagacacttatattttgattttacatgctggttacctgttccattgttgtcaaatgcccactctccatcagatgtgttcctccattttcttatccacaaagtactcctcacttttcaatttgtcatgttactaaatggtgttacattaaagccctgtgttaagtgtctgcttttgactgaatttcttcatagtaaccttcagtgtgtgtgtgtgactatgttcaattagtgggttgatcttcgtataattggccactatgtgagagttcactactaggcagaaactattatggacagtgaaataatgacttttatctcaccacgtgagtttgatgcagtcttttctgtctagcccttgcctcttcctgcccatgtgattgcggtgcagtagtttctgttgtataatagtgtggacagcagctcagaaaaggagggaatgctactgataatttgtagataatattctttaagacttaggggaaccattgaactttgaaatttttattagaaaattatttgttcagaatcagactccattattttacatatacttaaatactttaggggtatttttgaaagttagcccagttttttatgtgctattaaatttttagattacatactaaagaaaagtatgtacacagaatgtagtgctcctagttactattttttctattaagaaatagtttagttctggtgtaaaatttgtttgaatgctaaaaaaaaaaaagcaggactgcattatggcacttttgccttggtggcccactttctccatttaaaacattaggatttgtatttttctgctgcgtttgtatgaagacatatttgattgttgttttctcttgattttaaaataaaacctcatgagccctagtaaaaa

SEQ ID NO: 58 - protein, 930 aa, Homo sapiens
  ref <308>: DATABASE ACCESSION NUMBER: NCBI / NP_060362.3
  ref <309>: DATABASE ENTRY DATE: 2011-09-17
  ref <313>: RELEVANT RESIDUES IN SEQ ID NO: (1)..(930)
MCSGSGRRRSSLSPTMRPGTGAERGGLMMGHPGMHYAPMGMHPMGQRANMPPVPHGMMPQMMPPMGGPPMGQMPGMMSSVMPGMMMSHMSQASMQPALPPGVNSMDVAAGTASGAKSMWTEHKSPDGRTYYYNTETKQSTWEKPDDLKTPAEQLLSKCPWKEYKSDSGKPYYYNSQTKESRWAKPKELEDLEGYQNTIVAGSLITKSNLHAMIKAEESSKQEECTTTSTAPVPTTEIPTTMSTMAAAEAAAAVVAAAAAAAAAAAAANANASTSASNTVSGTVPVVPEPEVTSIVATVVDNENTVTISTEEQAQLTSTPAIQDQSVEVSSNTGEETSKQETVADFTPKKEEEESQPAKKTYTWNTKEEAKQAFKELLKEKRVPSNASWEQAMKMIINDPRYSALAKLSEKKQAFNAYKVQTEKEEKEEARSKYKEAKESFQRFLENHEKMTSTTRYKKAEQMFGEMEVWNAISERDRLEIYEDVLFFLSKKEKEQAKQLRKRNWEALKNILDNMANVTYSTTWSEAQQYLMDNPTFAEDEELQNMDKEDALICFEEHIRALEKEEEEEKQKSLLRERRRQRKNRESFQIFLDELHEHGQLHSMSSWMELYPTISSDIRFTNMLGQPGSTALDLFKFYVEDLKARYHDEKKIIKDILKDKGFVVEVNTTFEDFVAIISSTKRSTTLDAGNIKLAFNSLLEKAEAREREREKEEARKMKRKESAFKSMLKQAAPPIELDAVWEDIRERFVKEPAFEDITLESERKRIFKDFMHVLEHECQHHHSKNKKHSKKSKKHHRKRSRSRSGSDSDDDDSHSKKKRQRSESRSASEHSSSAESERSYKKSKKHKKKSKKRRHKSDSPESDAEREKDKKEKDRESEKDRTRQRSESKHKSPKKKTGKDSGNWDTSGSELSEGELEKRRRTLLEQLDDDQ

SEQ ID NO: 59 - DNA, 7528 bp, Homo sapiens
  ref <308>: DATABASE ACCESSION NUMBER: NCBI / NM_017892.3
  ref <309>: DATABASE ENTRY DATE: 2011-09-17
  ref <313>: RELEVANT RESIDUES IN SEQ ID NO: (1)..(7528)
actcagatcgcttcttgttggtatgtgtagcggcagtggccgccggcggagcagtctgagcccgacgatgaggccggggacgggagctgagcgtggaggcctcatgatggggcaccctggcatgcattatgccccaatgggaatgcaccctatgggtcagagagcgaatatgcctcctgtacctcatggaatgatgccgcagatgatgccccctatgggagggccaccaatgggacaaatgcctggaatgatgtcgtcagtaatgcctggaatgatgatgtctcatatgtctcaggcttccatgcagcctgccttaccgccaggagtaaatagtatggatgtagcagcaggtacagcatctggtgcaaaatcaatgtggactgaacataaatcacctgatggaaggacttactactacaacactgaaaccaaacagtctacctgggagaaaccagatgatcttaaaacacctgctgagcaactcttatctaaatgcccctggaaggaatacaaatcagattctggaaagccttactattataattctcaaacaaaagaatctcgctgggccaaacctaaagaacttgaggatcttgaaggataccagaataccattgttgctggaagtcttattacaaaatcaaacctgcatgcaatgatcaaagctgaagaaagcagtaagcaagaagagtgcaccacaacatcaacagccccagtccctacaacagaaattccgaccacaatgagcaccatggctgctgccgaagcagcagctgctgttgttgcagcagcagcagcggcagcagcagcagcagctgcagccaatgctaatgcttccacttctgcttctaatactgtcagtggaactgttccagttgttcctgagcctgaagttacttccattgttgctactgttgtagataatgagaatacagtaactatttcaactgaggaacaagcacaacttactagtacccctgctattcaggatcaaagtgtggaagtatccagtaatactggagaagaaacatctaagcaagaaactgtagctgattttactcccaaaaaagaagaggaggagagccaaccagcaaagaaaacatacacttggaatacaaaggaagaggcaaagcaagcttttaaagaattattgaaagaaaagcgggtaccatcgaatgcttcatgggagcaggctatgaaaatgattattaatgatccacgatacagtgctttggcaaagttaagtgaaaaaaagcaagcctttaatgcctataaagtccagacagaaaaagaagaaaaagaagaagcaagatcaaagtacaaagaggctaaggaatcctttcagcgttttcttgaaaatcatgagaaaatgacttctacaaccagatacaaaaaagcagagcaaatgtttggagagatggaagtttggaatgcaatatcagaacgtgatcgtcttgaaatctatgaagatgttttgttctttctttcaaaaaaagaaaaggaacaagcaaagcagttgcgaaagagaaattgggaagccttaaaaaacatacttgacaacatggctaatgtaacatactctaccacttggtctgaagcccagcagtatctgatggataatccaacttttgcagaagatgaggagttacaaaatatggacaaagaagatgcattaatttgctttgaagaacacattcgggctttagaaaaggaggaagaagaagaaaaacagaagagtttgctgagagaaaggagacgacagcgaaaaaatagggaatctttccagatatttttagatgaattacatgaacatggacaactgcattctatgtcatcttggatggaattgtatccaactattagttctgatattagattcactaatatgcttggtcagcctggatcaactgcacttgatcttttcaagttttatgttgaggatcttaaagcacgttatcatgacgagaagaagataataaaagacattctaaaggataaaggatttgtagttgaagtaaacactacttttgaagattttgtggcgataatcagttcaactaaaagatcaactacattagatgctggaaatatcaaattggctttcaatagtttactagaaaaggcagaagcccgtgaacgtgaaagagaaaaagaagaggctcggaagatgaaacgaaaagaatctgcatttaagagtatgttaaaacaagctgctcctccgatagaattggatgctgtctgggaagatatccgtgagagatttgtaaaagagccagcatttgaggacataactctagaatctgaaagaaaacgaatatttaaagattttatgcatgtgcttgagcatgaatgtcagcatcatcattcaaagaacaagaaacattctaagaaatctaaaaaacatcataggaaacgttcccgctctcgatcggggtcagattcagatgatgatgatagccattcaaagaaaaaaagacagcgatcagagtctcgttctgcttcagaacattcttctagtgcagagtctgagagaagttataaaaagtcaaaaaagcataagaagaaaagtaagaagaggagacataaatctgactctccagaatccgatgctgagcgagagaaggataaaaaagaaaaagatcgggaaagtgaaaaagacagaactagacaaagatcagaatcaaaacacaaatcgcctaagaaaaagactggaaaggattctggtaattgggatacttctggcagcgaactgagtgaaggggaattggaaaagcgcagaagaacccttttggagcaactggatgatgatcaataaattataccaaatatatgtttacagtatgatttaaagtctgattcagaccagggactctattttaagttcaactgaaataacactgggttttaattatatcacaggaaaaaaaaagtgcatttaagtattgttatcgtggactttataaaagcaaaggaaattgaaagtaacttttgattctgtatcaagaatcatattttcatacagtcataactgtctttctgtgaccctttcacagggcactgtaggatggattaaaggtggcaatttactgataactgcagatgtctctactttgttctaaaatctaagtcatgaggtgatttgatttactttatagaagctggattttgaagatctaatgaaaaattttttgataatatagtagtacaaaaaaagcaccagcaactgataaaaattgcttttttgtgcgctacccaactggttaaagccaatgtgatcttttatggtgaaactcctaagaaacaggtggttttgctggaaacttggtagacccttaattatagtggtgctaatgagcactactgtaatataaagccaccattattttttatcaaacatctgaatacattttacaaaggctattgtgagggcattattttgagcatctattttgaggtgatgtttaaaaaaactttaacatcaaatcaaattgtaaattaatttaaatatattgccttaaggacctactaaagaatgtgccaccagactttaagtgatagttgcaatatccttgtctaaaaaaaaaaaaaaagttgacttaaacattttctttaacagttgtcttttttttctaaattcagtctttctcttgcttttttttccctgctattgaggaagtattttgccttccctactcactgagaagtattgacttcgtggtacacattctaaagcatttctgatttgaatatttttgtacatttttatcaattattaaaccttctcttctagtgtgtactagtatttatttctacttaaactgctcagctctaaagaaattgtatgatcactttaaaggtactaaatccctgaaattttgcttcatcttacccacaccgctagtttactttccttttttaatatttaagaatattataaatcagtgcatttgaggtccctagatttgtttttcacctatgaattttttacagactattttagagaggctgtggtttgaagacagaatactctttacatgctaacttttgaaggttggtaatgtaatttatactattttccttcagtgcaggagattttttaagtaaataagtaaattttagcacctattcttcggtattatctgtgttattcttttaatgtgtacacttgaagagatcctatttcaaagttgggattttgaagaacaaaaagtttttttcttacccatcctagtgagttttgaaagtgggcctgaccagaatgtctctttcccattttgccccgtttgaattaaatataatgtctactctttaaaggctgaaggggtgggtgaggggattgtttctcattttgtctcccaagtcatttttctgctgtgaaatatgaccaggcttgtaggaagactcatcttggagaaaatgtgaagtaatcaaattgcttgagattagtctcctattgtatattagagccaaaacacataataactttggcaacagggagttgtctagactcaattttcagaggtcccattgtagtgagttaatattgctaatcatgtcaatcacttgacatggaagtcagtggcaaatctttaaagtatgcatttgatactggcaaatatatactactgatgtttcacaaaagaatcttagaatctgtagaaaacattaattacttccatgaattatttctaaagtataactttaaagttttgatttttctatttaaataaaaagctattgatgtgttttagcatgtcctcaaaatagattcctgtatttcttacagagataatcttactataaccgcaaatccctacaacacagtataaagtttccctgtagttcacccatgaaaattatttgacttaaaaacaaccatagtagtaagccaattgcaattcaaaatgcaacatccttgccataaaagatgtaacttaagtgactgtgatcctttgtctacctttcaggatcccatcaaatgggatttagttgctagaaagatacttgacagtctgaaggcacaggtgataagattttgttctctgtgaatatttttaaactaataggttatgtttttaaatcttcaatttggtaaaaaactgaaacgtcttggaatattggttctattagagttaaatatggtaaaacaggaaagcgtgtttattttcagataaggggaatttatacttttcattaaagtcttggagtcttaggaaaatgttgagggtttgtcttcccccagtgtcattaatactaatgaactattagatcaaattcacttatacatttaatatcatagttattcaaaatcaggactttaaatatttttttctcccagttcatatttctttgtgcgaaaattgaatttgtatgaaaagttagataattaagctaatcaagtatgaagtatacactcttcctaagtgaatttaaataatgtaatgcttttaaataaaagcagtggtcccaccacatttttttcagcatagtagctggcattttgttatcattagccagagtagcttcagcatataagttattgatgttttccaacttcaaaagtgcattttatgcctcccagtaaatttgataatgatttgtcacagctttgtcatcttttgacttttgcttatgggcctcacttcgtacaactataacatgaaaaaggattgtcctaaagtaagggaatcagttaatggtaggatgaagaaactgtaaaaactcctagaaaaaaacctgtgtgcatttttctggaaagttttcaaactgtgtaattcagttttcattcaattatataatttggttatatgctttaaaaaacatttgtctaaatgttcccggttttcttctggtcttagagtcagctgagtgctggctatgcagccactcgtatttttgcatccagaaaggagtaactccctttatatgaagatttttttttttaagcttagatgctatgtaagagaaaactatttgtaatcacatagtacccagggaggagtgatgaatgcttttttaaaaaaggatatttaagtatattatgtaatttaaatataaattatcaaactaaaaaacttcagcttttaaaactttctaaacaaaatgaagcaaagtacattaattccttctatcttaaatctgagactttttattttcccttgggtatatatttctctcagtgttaggtagatgttaattcaaccatcctacattctctatataaaattacactcattttacatgaaagcaaaataatgtcgttactttcatggaactgtgttctaacaggcttataatctcattctgtgcttctggtaatggcgtataccagtctgatgattcttaccatccttattcttacattactcttccaattgttttgattttaactggtggtcatgtaagttcctcggtggcagggatttatctggttcatttactgttatatatccttgtggaataggacagtgcctggcatataataggcacttttggaatgaatgtaaaatactagttgaaatatgtattcatctggcatccatggtacccatcatctgtattaaagggcttaaaaaagcatcattgcaataaaccatactaacccaccactaaagtcacagtcataattgaagtgcacccaaaataaggtccagtgactgtaccttagcttttacttcagacatgtccaaaacttgtgagaacatacaatttaaagttgaaaactcatcattttgggctatttttgaatagggctgaaatatggtgacatgtcaggcactcagttttttggagctgtcttaaaggtgaggtggaaagtgagagatgattttgctctaattacccacacattctccctaaccctccattttaagacacttagctataatagcttaagactatcaaaactgcttttgtgattctcagtaggatctagttcaaagccatctcagtgctagtgattggtaattgttaatttgatggtaattaccctacttgtaaagttgacattcatactggctaatcctccctgcccctagtcgtggacaatgaaacagtgagtggctggtgaattagatcagattcaaactaagccattccttgatgctattcttcactgctgttccttagggtatctaaatgtgttatttataaacatttttgggggctcctgcctgcaaacttcggtaggtgttggtcttccccacctctacaactgagccaaggacttgttctgaaaggtgagtaataaataagggaacaaggtttctattttctgtgtttgtaattaccagattttcacctctgtttatatattattctgatgtaaaagaacctcatagttatataaaattagaccttttgtaaataaatataatttattagaaaaaatggtatcttttactaaattggatttgtgtcagttttttcctttaagcaccactcaggcagcaagctctatgctgtgagagttgctggaggcccacgttatgttttctcagtgtaattcctctttttcttgataaaaaga

SEQ ID NO: 60 - DNA, 1852 bp, Homo sapiens
  ref <308>: DATABASE ACCESSION NUMBER: NCBI / NM_001101
  ref <309>: DATABASE ENTRY DATE: 2011-11-26
  ref <313>: RELEVANT RESIDUES IN SEQ ID NO: (1)..(1852)
accgccgagaccgcgtccgccccgcgagcacagagcctcgcctttgccgatccgccgcccgtccacacccgccgccagctcaccatggatgatgatatcgccgcgctcgtcgtcgacaacggctccggcatgtgcaaggccggcttcgcgggcgacgatgccccccgggccgtcttcccctccatcgtggggcgccccaggcaccagggcgtgatggtgggcatgggtcagaaggattcctatgtgggcgacgaggcccagagcaagagaggcatcctcaccctgaagtaccccatcgagcacggcatcgtcaccaactgggacgacatggagaaaatctggcaccacaccttctacaatgagctgcgtgtggctcccgaggagcaccccgtgctgctgaccgaggcccccctgaaccccaaggccaaccgcgagaagatgacccagatcatgtttgagaccttcaacaccccagccatgtacgttgctatccaggctgtgctatccctgtacgcctctggccgtaccactggcatcgtgatggactccggtgacggggtcacccacactgtgcccatctacgaggggtatgccctcccccatgccatcctgcgtctggacctggctggccgggacctgactgactacctcatgaagatcctcaccgagcgcggctacagcttcaccaccacggccgagcgggaaatcgtgcgtgacattaaggagaagctgtgctacgtcgccctggacttcgagcaagagatggccacggctgcttccagctcctccctggagaagagctacgagctgcctgacggccaggtcatcaccattggcaatgagcggttccgctgccctgaggcactcttccagccttccttcctgggcatggagtcctgtggcatccacgaaactaccttcaactccatcatgaagtgtgacgtggacatccgcaaagacctgtacgccaacacagtgctgtctggcggcaccaccatgtaccctggcattgccgacaggatgcagaaggagatcactgccctggcacccagcacaatgaagatcaagatcattgctcctcctgagcgcaagtactccgtgtggatcggcggctccatcctggcctcgctgtccaccttccagcagatgtggatcagcaagcaggagtatgacgagtccggcccctccatcgtccaccgcaaatgcttctaggcggactatgacttagttgcgttacaccctttcttgacaaaacctaacttgcgcagaaaacaagatgagattggcatggctttatttgttttttttgttttgttttggttttttttttttttttggcttgactcaggatttaaaaactggaacggtgaaggtgacagcagtcggttggagcgagcatcccccaaagttcacaatgtggccgaggactttgattgcacattgttgtttttttaatagtcattccaaatatgagatgcgttgttacaggaagtcccttgccatcctaaaagccaccccacttctctctaaggagaatggcccagtcctctcccaagtccacacaggggaggtgatagcattgctttcgtgtaaattatgtaatgcaaaatttttttaatcttcgccttaatacttttttattttgttttattttgaatgatgagccttcgtgcccccccttcccccttttttgtcccccaacttgagatgtatgaaggcttttggtctccctgggagtgggtggaggcagccagggcttacctgtacactgacttgagaccagttgaataaaagtgcacaccttaaaaatgaaaaaaaaaaaaaaaaaaaaaaaaaaaaaaaaaaaaaaaaa

SEQ ID NO: 61 - DNA, 2408 bp, Homo sapiens
  ref <308>: DATABASE ACCESSION NUMBER: NCBI / NM_000043
  ref <309>: DATABASE ENTRY DATE: 2011-11-28
  ref <313>: RELEVANT RESIDUES IN SEQ ID NO: (1)..(2408)
aaacaccgctctggtcaccatggcaacagcgggatgccgcgaacggcttctgggcggggccggtccctcggacgattggacctagcttggcgcggaatccgtgaattgcccgcggcccgagggtgcagctcccggactgactggctctgcccttccccatggacgcctcctctagcccgtggaatccaaccccggctcctgtcagcagccctcccctgctgctccccatccctgccatcgtcttcatcgctgtgggcatctatttgttgctgctgggtctagtcctgctgactaggaactgcctgctggcccagggctgctgcgcggacggtagctccccctgcaggaagcaaggttcctccgggcccccagactgctgctggacctgtgcagaagcctgcaactttcctctgcctagcccggcccacttcctggatgcttgctgcccccagcccaccagagctgactgggcacctcgctgcccccgctgctgcccactctgcgactgtgcctgtacgtgccagctccccgactgccagagcctcaactgtctctgcttcgagatcaagctccgatgaggacccagggcccctgccctctggggagcggccagcccccagggcccatgtgccctcctccctgaagagcctttccccacgccactggaaccacagatggcctgccgagcacccaggcctgggaactggaagtggcagcgcagggcctggctccctgcagggcaggactcttggccggctggacggcagctcctctggagggccagaaaagagaggggctagtgctcgggcaggtgccctggcttcccttcccctccacacgtcaacgattctatttgaagttgggcaggggggtggcgctgctcaccacacacaagtgttataggaggagtctggcccttgagtaccgggtacgcaggggtgcctcaaccacactccgtccacggactctccgttattttaggaggtccctggccaaagatttatttctcttgacaaccaagggcctccgtctggatttccaaggaagaatttcctctgaagcaccggaacttgctactaccagcaccatgccctaccaatatccagcactgaccccggagcagaagaaggagctgtctgacatcgctcaccgcatcgtggcacctggcaagggcatcctggctgcagatgagtccactgggagcattgccaagcggctgcagtccattggcaccgagaacaccgaggagaaccggcgcttctaccgccagctgctgctgacagctgacgaccgcgtgaacccctgcattgggggtgtcatcctcttccatgagacactctaccagaaggcggatgatgggcgtcccttcccccaagttatcaaatccaagggcggtgttgtgggcatcaaggtagacaagggcgtggtccccctggcagggacaaatggcgagactaccacccaagggttggatgggctgtctgagcgctgtgcccagtacaagaaggacggagctgacttcgccaagtggcgttgtgtgctgaagattggggaacacaccccctcagccctcgccatcatggaaaatgccaatgttctggcccgttatgccagtatctgccagcagaatggcattgtgcccatcgtggagcctgagatcctccctgatggggaccatgacttgaagcgctgccagtatgtgaccgagaaggtgctggctgctgtctacaaggctctgagtgaccaccacatctacctggaaggcaccttgctgaagcccaacatggtcaccccaggccatgcttgcactcagaagttttctcatgaggagattgccatggcgaccgtcacagcgctgcgccgcacagtgccccccgctgtcactgggatcaccttcctgtctggaggccagagtgaggaggaggcgtccatcaacctcaatgccattaacaagtgccccctgctgaagccctgggccctgaccttctcctacggccgagccctgcaggcctctgccctgaaggcctggggcgggaagaaggagaacctgaaggctgcgcaggaggagtatgtcaagcgagccctggccaacagccttgcctgtcaaggaaagtacactccgagcggtcaggctggggctgctgccagcgagtccctcttcgtctctaaccacgcctattaagcggaggtgttcccaggctgcccccaacactccaggccctgccccctcccactcttgaagaggaggccgcctcctcggggctccaggctggcttgcccgcgctctttcttccctcgtgacagtggtgtgtggtgtcgtctgtgaatgctaagtccatcaccctttccggcacactgccaaataaacagctatttaagggggagtcggcaaaaaaaaaaaaaaaaaa

SEQ ID NO: 62 - DNA, 1310 bp, Homo sapiens
  ref <308>: DATABASE ACCESSION NUMBER: NCBI / NM_002046
  ref <309>: DATABASE ENTRY DATE: 2011-11-21
  ref <313>: RELEVANT RESIDUES IN SEQ ID NO: (1)..(1310)
aaattgagcccgcagcctcccgcttcgctctctgctcctcctgttcgacagtcagccgcatcttcttttgcgtcgccagccgagccacatcgctcagacaccatggggaaggtgaaggtcggagtcaacggatttggtcgtattgggcgcctggtcaccagggctgcttttaactctggtaaagtggatattgttgccatcaatgaccccttcattgacctcaactacatggtttacatgttccaatatgattccacccatggcaaattccatggcaccgtcaaggctgagaacgggaagcttgtcatcaatggaaatcccatcaccatcttccaggagcgagatccctccaaaatcaagtggggcgatgctggcgctgagtacgtcgtggagtccactggcgtcttcaccaccatggagaaggctggggctcatttgcaggggggagccaaaagggtcatcatctctgccccctctgctgatgcccccatgttcgtcatgggtgtgaaccatgagaagtatgacaacagcctcaagatcatcagcaatgcctcctgcaccaccaactgcttagcacccctggccaaggtcatccatgacaactttggtatcgtggaaggactcatgaccacagtccatgccatcactgccacccagaagactgtggatggcccctccgggaaactgtggcgtgatggccgcggggctctccagaacatcatccctgcctctactggcgctgccaaggctgtgggcaaggtcatccctgagctgaacgggaagctcactggcatggccttccgtgtccccactgccaacgtgtcagtggtggacctgacctgccgtctagaaaaacctgccaaatatgatgacatcaagaaggtggtgaagcaggcgtcggagggccccctcaagggcatcctgggctacactgagcaccaggtggtctcctctgacttcaacagcgacacccactcctccacctttgacgctggggctggcattgccctcaacgaccactttgtcaagctcatttcctggtatgacaacgaatttggctacagcaacagggtggtggacctcatggcccacatggcctccaaggagtaagacccctggaccaccagccccagcaagagcacaagaggaagagagagaccctcactgctggggagtccctgccacactcagtcccccaccacactgaatctcccctcctcacagttgccatgtagaccccttgaagaggggaggggcctagggagccgcaccttgtcatgtaccatcaataaagtaccctgtgctcaacc

SEQ ID NO: 63 - DNA, 2439 bp, Homo sapiens
  ref <308>: DATABASE ACCESSION NUMBER: NCBI / NM_000291
  ref <309>: DATABASE ENTRY DATE: 2011-11-26
  ref <313>: RELEVANT RESIDUES IN SEQ ID NO: (1)..(2439)
gagagcagcggccgggaaggggcggtgcgggaggcggggtgtggggcggtagtgtgggccctgttcctgcccgcgcggtgttccgcattctgcaagcctccggagcgcacgtcggcagtcggctccctcgttgaccgaatcaccgacctctctccccagctgtatttccaaaatgtcgctttctaacaagctgacgctggacaagctggacgttaaagggaagcgggtcgttatgagagtcgacttcaatgttcctatgaagaacaaccagataacaaacaaccagaggattaaggctgctgtcccaagcatcaaattctgcttggacaatggagccaagtcggtagtccttatgagccacctaggccggcctgatggtgtgcccatgcctgacaagtactccttagagccagttgctgtagaactcaaatctctgctgggcaaggatgttctgttcttgaaggactgtgtaggcccagaagtggagaaagcctgtgccaacccagctgctgggtctgtcatcctgctggagaacctccgctttcatgtggaggaagaagggaagggaaaagatgcttctgggaacaaggttaaagccgagccagccaaaatagaagctttccgagcttcactttccaagctaggggatgtctatgtcaatgatgcttttggcactgctcacagagcccacagctccatggtaggagtcaatctgccacagaaggctggtgggtttttgatgaagaaggagctgaactactttgcaaaggccttggagagcccagagcgacccttcctggccatcctgggcggagctaaagttgcagacaagatccagctcatcaataatatgctggacaaagtcaatgagatgattattggtggtggaatggcttttaccttccttaaggtgctcaacaacatggagattggcacttctctgtttgatgaagagggagccaagattgtcaaagacctaatgtccaaagctgagaagaatggtgtgaagattaccttgcctgttgactttgtcactgctgacaagtttgatgagaatgccaagactggccaagccactgtggcttctggcatacctgctggctggatgggcttggactgtggtcctgaaagcagcaagaagtatgctgaggctgtcactcgggctaagcagattgtgtggaatggtcctgtgggggtatttgaatgggaagcttttgcccggggaaccaaagctctcatggatgaggtggtgaaagccacttctaggggctgcatcaccatcataggtggtggagacactgccacttgctgtgccaaatggaacacggaggataaagtcagccatgtgagcactgggggtggtgccagtttggagctcctggaaggtaaagtccttcctggggtggatgctctcagcaatatttagtactttcctgccttttagttcctgtgcacagcccctaagtcaacttagcattttctgcatctccacttggcattagctaaaaccttccatgtcaagattcagctagtggccaagagatgcagtgccaggaacccttaaacagttgcacagcatctcagctcatcttcactgcaccctggatttgcatacattcttcaagatcccatttgaattttttagtgactaaaccattgtgcattctagagtgcatatatttatattttgcctgttaaaaagaaagtgagcagtgttagcttagttctcttttgatgtaggttattatgattagctttgtcactgtttcactactcagcatggaaacaagatgaaattccatttgtaggtagtgagacaaaattgatgatccattaagtaaacaataaaagtgtccattgaaaccgtgatttttttttttttcctgtcatactttgttaggaagggtgagaatagaatcttgaggaacggatcagatgtctatattgctgaatgcaagaagtggggcagcagcagtggagagatgggacaattagataaatgtccattctttatcaagggcctactttatggcagacattgtgctagtgcttttattctaacttttatttttatcagttacacatgatcataatttaaaaagtcaaggcttataacaaaaaagccccagcccattcctcccattcaagattcccactccccagaggtgaccactttcaactcttgagtttttcaggtatatacctccatgtttctaagtaatatgcttatattgttcacttcttttttttttattttttaaagaaatctatttcataccatggaggaaggctctgttccacatatatttccacttcttcattctctcggtatagttttgtcacaattatagattagatcaaaagtctacataactaatacagctgagctatgtagtatgctatgattaaatttacttatgtaaaaaaaaaaaaaaaaaa

SEQ ID NO: 64 - DNA, 2226 bp, Homo sapiens
  ref <308>: DATABASE ACCESSION NUMBER: NCBI / NM_005566
  ref <309>: DATABASE ENTRY DATE: 2011-12-25
  ref <313>: RELEVANT RESIDUES IN SEQ ID NO: (1)..(2226)
gtctgccggtcggttgtctggctgcgcgcgccacccgggcctctccagtgccccgcctggctcggcatccacccccagcccgactcacacgtgggttcccgcacgtccgccggccccccccgctgacgtcagcatagctgttccacttaaggcccctcccgcgcccagctcagagtgctgcagccgctgccgccgattccggatctcattgccacgcgcccccgacgaccgcccgacgtgcattcccgattccttttggttccaagtccaatatggcaactctaaaggatcagctgatttataatcttctaaaggaagaacagaccccccagaataagattacagttgttggggttggtgctgttggcatggcctgtgccatcagtatcttaatgaaggacttggcagatgaacttgctcttgttgatgtcatcgaagacaaattgaagggagagatgatggatctccaacatggcagccttttccttagaacaccaaagattgtctctggcaaagactataatgtaactgcaaactccaagctggtcattatcacggctggggcacgtcagcaagagggagaaagccgtcttaatttggtccagcgtaacgtgaacatctttaaattcatcattcctaatgttgtaaaatacagcccgaactgcaagttgcttattgtttcaaatccagtggatatcttgacctacgtggcttggaagataagtggttttcccaaaaaccgtgttattggaagcggttgcaatctggattcagcccgattccgttacctaatgggggaaaggctgggagttcacccattaagctgtcatgggtgggtccttggggaacatggagattccagtgtgcctgtatggagtggaatgaatgttgctggtgtctctctgaagactctgcacccagatttagggactgataaagataaggaacagtggaaagaggttcacaagcaggtggttgagagtgcttatgaggtgatcaaactcaaaggctacacatcctgggctattggactctctgtagcagatttggcagagagtataatgaagaatcttaggcgggtgcacccagtttccaccatgattaagggtctttacggaataaaggatgatgtcttccttagtgttccttgcattttgggacagaatggaatctcagaccttgtgaaggtgactctgacttctgaggaagaggcccgtttgaagaagagtgcagatacactttgggggatccaaaaggagctgcaattttaaagtcttctgatgtcatatcatttcactgtctaggctacaacaggattctaggtggaggttgtgcatgttgtcctttttatctgatctgtgattaaagcagtaatattttaagatggactgggaaaaacatcaactcctgaagttagaaataagaatggtttgtaaaatccacagctatatcctgatgctggatggtattaatcttgtgtagtcttcaactggttagtgtgaaatagttctgccacctctgacgcaccactgccaatgctgtacgtactgcatttgccccttgagccaggtggatgtttaccgtgtgttatataacttcctggctccttcactgaacatgcctagtccaacattttttcccagtgagtcacatcctgggatccagtgtataaatccaatatcatgtcttgtgcataattcttccaaaggatcttattttgtgaactatatcagtagtgtacattaccatataatgtaaaaagatctacatacaaacaatgcaaccaactatccaagtgttataccaactaaaacccccaataaaccttgaacagtgactactttggttaattcattatattaagatataaagtcataaagctgctagttattatattaatttggaaatattaggctattcttgggcaaccctgcaacgattttttctaacagggatattattgactaatagcagaggatgtaatagtcaactgagttgtattggtaccacttccattgtaagtcccaaagtattatatatttgataataatgctaatcataattggaaagtaacattctatatgtaaatgtaaaatttatttgccaactgaatataggcaatgatagtgtgtcactatagggaacacagatttttgagatcttgtcctctggaagctggtaacaattaaaaacaatcttaaggcagggaaaaaaaaaaaaaaaaaa

SEQ ID NO: 65 - DNA, 1068 bp, Homo sapiens
  ref <308>: DATABASE ACCESSION NUMBER: NCBI / NM_002954
  ref <309>: DATABASE ENTRY DATE: 2011-11-28
  ref <313>: RELEVANT RESIDUES IN SEQ ID NO: (1)..(1068)
ctcgacctccttttaaaaattctcttagccacgttgattgtacgggaaaagcctttttaaaacatcttttacgttgcttaaacctacagtttcgaaagcattccgaaggctaaagtgagaaataagcccaggctagggagaggagaaacgaagttcacgtcctagtctggcaccgggttggattgtcgctgggacggcagtcaggcatttggtgtggtcgcctaaggggtgggtccttcggcgggagctccgggaaaccccgtgggcctgcgcggcgttcttccttttcgatccgccatctgcggtggagccgccaccaaaatgcagattttcgtgaaaacccttacggggaagaccatcaccctcgaggttgaaccctcggatacgatagaaaatgtaaaggccaagatccaggataaggaaggaattcctcctgatcagcagagactgatctttgctggcaagcagctggaagatggacgtactttgtctgactacaatattcaaaaggagtctactcttcatcttgtgttgagacttcgtggtggtgctaagaaaaggaagaagaagtcttacaccactcccaagaagaataagcacaagagaaagaaggttaagctggctgtcctgaaatattataaggtggatgagaatggcaaaattagtcgccttcgtcgagagtgcccttctgatgaatgtggtgctggggtgtttatggcaagtcactttgacagacattattgtggcaaatgttgtctgacttactgtttcaacaaaccagaagacaagtaactgtatgagttaataaaagacatgaactaacatttattgttgggttttattgcagtaaaaagaatggtttttaagcaccaaattgatggtcacaccatttccttttagtagtgctactgctatcgctgtgtgaatgttgcctctggggattatgtgacccagtggttctgtatacctgccaggtgccaaccacttgtaaaggtcttgatattttcaattcttagactacctatactttggcagaagttatatttaatgtaagttgtctaaatataa

SEQ ID NO: 66 - DNA, 748 bp, Homo sapiens
  ref <308>: DATABASE ACCESSION NUMBER: NCBI / NM_000981
  ref <309>: DATABASE ENTRY DATE: 2011-12-17
  ref <313>: RELEVANT RESIDUES IN SEQ ID NO: (1)..(748)
gcagataatgggaggagccgggcccgagcgagctctttcctttcgctgctgcggccgcagccatgagtatgctcaggcttcagaagaggctcgcctctagtgtcctccgctgtggcaagaagaaggtctggttagaccccaatgagaccaatgaaatcgccaatgccaactcccgtcagcagatccggaagctcatcaaagatgggctgatcatccgcaagcctgtgacggtccattcccgggctcgatgccggaaaaacaccttggcccgccggaagggcaggcacatgggcataggtaagcggaagggtacagccaatgcccgaatgccagagaaggtcacatggatgaggagaatgaggattttgcgccggctgctcagaagataccgtgaatctaagaagatcgatcgccacatgtatcacagcctgtacctgaaggtgaaggggaatgtgttcaaaaacaagcggattctcatggaacacatccacaagctgaaggcagacaaggcccgcaagaagctcctggctgaccaggctgaggcccgcaggtctaagaccaaggaagcacgcaagcgccgtgaagagcgcctccaggccaagaaggaggagatcatcaagactttatccaaggaggaagagaccaagaaataaaacctcccactttgtctgtacatactggcctctgtgattacatagatcagccattaaaataaaacaagccttaatctgcaaaaaaaaaaaaaaaa

SEQ ID NO: 67 - DNA, 644 bp, Homo sapiens
  ref <308>: DATABASE ACCESSION NUMBER: NCBI / NM_000975
  ref <309>: DATABASE ENTRY DATE: 2011-12-19
  ref <313>: RELEVANT RESIDUES IN SEQ ID NO: (1)..(644)
aaggccctcggccggaagctccgctttctcttcctgctctccatcatggcgcaggatcaaggtgaaaaggagaaccccatgcgggaacttcgcatccgcaaactctgtctcaacatctgtgttggggagagtggagacagactgacgcgagcagccaaggtgttggagcagctcacagggcagacccctgtgttttccaaagctagatacactgtcagatcctttggcatccggagaaatgaaaagattgctgtccactgcacagttcgaggggccaaggcagaagaaatcttggagaagggtctaaaggtgcgggagtatgagttaagaaaaaacaacttctcagatactggaaactttggttttgggatccaggaacacatcgatctgggtatcaaatatgacccaagcattggtatctacggcctggacttctatgtggtgctgggtaggccaggtttcagcatcgcagacaagaagcgcaggacaggctgcattggggccaaacacagaatcagcaaagaggaggccatgcgctggttccagcagaagtatgatgggatcatccttcctggcaaataaattcccgtttctatccaaaagagcaataaaaagttttcagtgaaatgtgcaaaaaaaaaaaa

SEQ ID NO: 68 - DNA, 3114 bp, Homo sapiens
  ref <308>: DATABASE ACCESSION NUMBER: NCBI / NM_007363
  ref <309>: DATABASE ENTRY DATE: 2011-12-24
  ref <313>: RELEVANT RESIDUES IN SEQ ID NO: (1)..(3114)
caggcgcagtgcaggactgctccgagcacgcctacgcgcgcattttctccccttcctctccctctttccactttcctctccctttttctcctctcctttccccctcccaccacttggtctttcagtctttcagtcagttcgtttaggtctctccttccgacccccacccccagctcctctccctttccttttccccctccccctttcctttcccgtctcacgcgccaggccgcttgcacatgcgcattaggtacaaagcctcgctctttgtccccatctgtcgttcacacgaactcaagcctttggcattcggcagccaatagaatctaagaaatggcggaaaaatgattccgcctcgggagctaaaccttgattggcagtttagctaaccaatcgagaacgccattttgtaccccttggcaggcaccgagctccgtcgtctcgtttccggcggtcgcgcgctcttttctcgggacgggagaggccgtgtagcgtcgccgttactccgaggagataccagtcggtagaggagaagtcgaggttagagggaactgggaggcactttgctgtctgcaatcgaagttgagggtgcaaaaatgcagagtaataaaacttttaacttggagaagcaaaaccatactccaagaaagcatcatcaacatcaccaccagcagcagcaccaccagcagcaacagcagcagccgccaccaccgccaatacctgcaaatgggcaacaggccagcagccaaaatgaaggcttgactattgacctgaagaattttagaaaaccaggagagaagaccttcacccaacgaagccgtctttttgtgggaaatcttcctcccgacatcactgaggaagaaatgaggaaactatttgagaaatatggaaaggcaggcgaagtcttcattcataaggataaaggatttggctttatccgcttggaaacccgaaccctagcggagattgccaaagtggagctggacaatatgccactccgtggaaagcagctgcgtgtgcgctttgcctgccatagtgcatcccttacagttcgaaaccttcctcagtatgtgtccaacgaactgctggaagaagccttttctgtgtttggccaggtagagagggctgtagtcattgtggatgatcgaggaaggccctcaggaaaaggcattgttgagttctcagggaagccagctgctcggaaagctctggacagatgcagtgaaggctccttcctgctaaccacatttcctcgtcctgtgactgtggagcccatggaccagttagatgatgaagagggacttccagagaagctggttataaaaaaccagcaatttcacaaggaacgagagcagccacccagatttgcacagcctggctcctttgagtatgaatatgccatgcgctggaaggcactcattgagatggagaagcagcagcaggaccaagtggaccgcaacatcaaggaggctcgtgagaagctggagatggagatggaagctgcacgccatgagcaccaggtcatgctaatgagacaggatttgatgaggcgccaagaagaacttcggaggatggaagagctgcacaaccaagaggtgcaaaaacgaaagcaactggagctcaggcaggaggaagagcgcaggcgccgtgaagaagagatgcggcggcagcaagaagaaatgatgcggcgacagcaggaaggattcaagggaaccttccctgatgcgagagagcaggagattcggatgggtcagatggctatgggaggtgctatgggcataaacaacagaggtgccatgccccctgctcctgtgccagctggtaccccagctcctccaggacctgccactatgatgccggatggaactttgggattgaccccaccaacaactgaacgctttggtcaggctgctacaatggaaggaattggggcaattggtggaactcctcctgcattcaaccgtgcagctcctggagctgaatttgccccaaacaaacgtcgccgatactaataagttgcagtgtctagtttctcaaaacccttaaaagaaggaccctttttggactagccagaattctaccctggaaaagtgttagggattccttccaatagttagatctaccctgcctgtactactctagggagtatgctggaggcagagggcaagggaggggtggtattaaacaagtcaattctgtgtggtatattgtttaatcagttctgtgtggtgcattcctgaagtctctaatgtgactgttgagggcctggggaaaccatggcaaagtggatccagttagagcccattaatcttgatcattccggttttttttttttttgtccatcttgtttcatttgcttgccccgcccccgagacggagtcttactctgtcgcccaggctggagtgtagtggcatgatctcggctcactgcaatctctgcctcccgggttcaagcttgtccaggttgatcttgaactcctgacctcgtgatctacccacctcggcctcccaaaatgctgggattacaggggtgagccaccgtgcccaacctcacttgcttcttatccttacactcccccagccccagagaaactgccacatacaccacaaaaaccaaacatcccccaatgaccttagccccattgctccattcactcccaggtgagaattcaggcaaacgtccacaaaggtcacaggcagcgtacatacggttctgttataccccatatattaccccttcatgtcctaaagaagacattttctcttagagattttcattttagtgtatctttaaaaaaaaatcttgtgttaacttgcctccatctttttcttgggtgaggacacccaggaatgacccttttgtgtctatgatgttgctgttcacagcttttcttgataggcctagtacaatcttgggaacagggttactgtatactgaaggtctgacagtagctcttagactcgcctatcttaggtagtcatgctgtgcattttttttttcattggtgtactgtgtttgatttgtctcatatatttggagtttttctgaaaaatggagcagtaatgcagcatcaacctattaaaatacattttaagccttttaaaaaaaaaaaa

SEQ ID NO: 69 - DNA, 1956 bp, Homo sapiens
  ref <308>: DATABASE ACCESSION NUMBER: NCBI / NM_004309
  ref <309>: DATABASE ENTRY DATE: 2011-11-28
  ref <313>: RELEVANT RESIDUES IN SEQ ID NO: (1)..(1956)
gagcggaagtctcgtgaccccggaagtgacaggcagggcgggcggggcggccgacgacgttcgtcatttagtgcgggagggatcctgaaccgcgcggccgaaccctccggtgtcccgacccaggctaagcttgagcatggctgagcaggagcccacagccgagcagctggcccagattgcagcggagaacgaggaggatgagcactcggtcaactacaagcccccggcccagaagagcatccaggagatccaggagctggacaaggacgacgagagcctgcgaaagtacaaggaggccctgctgggccgcgtggccgtttccgcagaccccaacgtccccaacgtcgtggtgactggcctgaccctggtgtgcagctcggccccgggccccctggagctggacctgacgggcgacctggagagcttcaagaagcagtcgtttgtgctgaaggagggtgtggagtaccggataaaaatctctttccgggttaaccgagagatagtgtccggcatgaagtacatccagcatacgtacaggaaaggcgtcaagattgacaagactgactacatggtaggcagctatgggccccgggccgaggagtacgagttcctgacccccgtggaggaggcacccaagggtatgctggcccggggcagctacagcatcaagtcccgcttcacagacgacgacaagaccgaccacctgtcctgggagtggaatctcaccatcaagaaggactggaaggactgagcccagccagaggcgggcagggcagactgacggacggacgacggacaggcggatgtgtcccccccagcccctcccctccccataccaaagtgctgacaggccctccgtgcccctcccaccctggtccgcctccctggcctggctcaaccgagtgcctccgacccccctcctcagccctcccccacccacaggcccagcctcctcggtctcctgtctcgttgctgcttctgcctgtgctgtgggggagagaggccgcagccaggcctctgctgccctttctgtgccccccaggttctatctccccgtcacacccgaggcctggcttcaggagggagcggagcagccattctccaggccccgtggttgcccctggacgtgtgcgtctgctgctccggggtggagctggggtgtgggatgcacggcctcgtgggggccgggccgtcctccagccccgctgctccctggccagcccccttgtcgctgtcggtcccgtctaaccatgatgccttaacatgtggagtgtaccgtggggcctcactagcctctaactccctgtgtctgcatgagcatgtggcctccccgtcccttccccggtggcgaacccagtgacccagggacacgtggggtgtgctgctgctgctccccagcccaccagtgcctggccagcctgcccccttccctggacagggctgtggagatggctccggcggcttggggaaagccaaattgccaaaactcaagtcacctcagtaccatccaggaggctgggtattgtcctgcctctgccttttctgtctcagcgggcagtgcccagagcccacacccccccaagagccctcgatggacagcctcacccaccccacctgggcccagccaggagccccgcctggccatcagtatttattgcctccgtccgtgccgtccctgggccactggcctggcgcctgttcccccaggctctcagtgccaccacccccggcaggccttccctgacccagccaggaacaaacaagggaccaagtgcacacattgctgagagccgtctcctgtgcctcccccgccccatccccggtcttcgtgttgtgtctgccaggctcaggcagaggcgcctgtccctgcttcttttctgaccgggaaataaatgcccctgaaggaaaaaaaaaaaaaaaaaaaaaaaaaaaaaaaaaaaaaaaaaaaaaaaaaaa

SEQ ID NO: 70 - DNA, 1668 bp, Homo sapiens
  ref <308>: DATABASE ACCESSION NUMBER: NCBI / NM_000994
  ref <309>: DATABASE ENTRY DATE: 2011-11-28
  ref <313>: RELEVANT RESIDUES IN SEQ ID NO: (1)..(1668)
aggggttacgacccatcagcccttgcgcgccaccgtcccttctctcttcctcggcgctgcctacggaggtggcagccatctccttctcggcatcatggccgccctcagaccccttgtgaagcccaagatcgtcaaaaagagaaccaagaagttcatccggcaccagtcagaccgatatgtcaaaattaagcgtaactggcggaaacccagaggcattgacaacagggttcgtagaagattcaagggccagatcttgatgcccaacattggttatggaagcaacaaaaaaacaaagcacatgctgcccagtggcttccggaagttcctggtccacaacgtcaaggagctggaagtgctgctgatgtgcaacaaatcttactgtgccgagatcgctcacaatgtttcctccaagaaccgcaaagccatcgtggaaagagctgcccaactggccatcagagtcaccaaccccaatgccaggctgcgcagtgaagaaaatgagtaggcagctcatgtgcacgttttctgtttaaataaatgtaaaaactgccatctggcatcttccttccttgattttaagtcttcagcttcttggccaacttagtttgccacagagattgttcttttgcttaagcccctttggaatctcccatttggaggggatttgtaaaggacactcagtccttgaacaggggaatgtggcctcaagtgcacagactagccttagtcatctccagttgaggctgggtatgaggggtacagacttggccctcacaccaggtaggttctgagacacttgaagaagcttgtggctcccaagccacaagtagtcattcttagccttgcttttgtaaagttaggtgacaagttattccatgtgatgcttgtgagaattgagaaaatatgcatggaaatatccagatgaatttcttacacagattcttacgggatgcctaaattgcatcctgtaacttctgtccaaaaagaacaggatgatgtacaaattgctcttccaggtaatccaccacggttaactggaaaagcactttcagtctcctataaccctcccaccagctgctgcttcaggtataatgttacagcagtttgccaaggcggggacctaactggtgacaattgagcctcttgactggtactcagaatttagtgacacgtggtcctgattttttttggagacggggtcttgctctcacccaggctgggagtgcagtggcacactgactacagccttgacctccccaggctcaggtgatcttcccacctcagccttccaagtagctgggactacagatgcacacctccaaacctgggtagtttttgaagtttttttgtagaggtggtctagccatgttgcctaggctcccgaactcctgagctcaagcaatcctgcttcagcctcccaaagtactgggattacaggcatcttctgtagtatataggtcatgagggatatgggatgtggtacttatgagacagaaatgcttacaggatgtttttctgtaaccatcctggtcaacttagcagaaatgctgcgctgggtataataaagcttttctacttctagtctagacaggaatcttacagattgtctcctgttcaaaacctagtcataaatatttataatgcaaactggtcaaaaaaaaaaaaaaaaaa

SEQ ID NO: 71 - DNA, 549 bp, Homo sapiens
  ref <308>: DATABASE ACCESSION NUMBER: NCBI / NM_022551
  ref <309>: DATABASE ENTRY DATE: 2011-11-20
  ref <313>: RELEVANT RESIDUES IN SEQ ID NO: (1)..(549)
ctctcttccacaggaggcctacacgccgccgcttgtgctgcagccatgtctctagtgatccctgaaaagttccagcatattttgcgagtactcaacaccaacatcgatgggcggcggaaaatagcctttgccatcactgccattaagggtgtgggccgaagatatgctcatgtggtgttgaggaaagcagacattgacctcaccaagagggcgggagaactcactgaggatgaggtggaacgtgtgatcaccattatgcagaatccacgccagtacaagatcccagactggttcttgaacagacagaaggatgtaaaggatggaaaatacagccaggtcctagccaatggtctggacaacaagctccgtgaagacctggagcgactgaagaagattcgggcccatagagggctgcgtcacttctggggccttcgtgtccgaggccagcacaccaagaccactggccgccgtggccgcaccgtgggtgtgtccaagaagaaataagtctgtaggccttgtctgttaataaatagtttatatacaaaaaaa

SEQ ID NO: 72 - DNA, 2567 bp, Homo sapiens
  ref <308>: DATABASE ACCESSION NUMBER: NCBI / NM_007355
  ref <309>: DATABASE ENTRY DATE: 2011-11-13
  ref <313>: RELEVANT RESIDUES IN SEQ ID NO: (1)..(2567)
ctccggcgcagtgttgggactgtctgggtatcggaaagcaagcctacgttgctcactattacgtataatccttttcttttcaagatgcctgaggaagtgcaccatggagaggaggaggtggagacttttgcctttcaggcagaaattgcccaactcatgtccctcatcatcaataccttctattccaacaaggagattttccttcgggagttgatctctaatgcttctgatgccttggacaagattcgctatgagagcctgacagacccttcgaagttggacagtggtaaagagctgaaaattgacatcatccccaaccctcaggaacgtaccctgactttggtagacacaggcattggcatgaccaaagctgatctcataaataatttgggaaccattgccaagtctggtactaaagcattcatggaggctcttcaggctggtgcagacatctccatgattgggcagtttggtgttggcttttattctgcctacttggtggcagagaaagtggttgtgatcacaaagcacaacgatgatgaacagtatgcttgggagtcttctgctggaggttccttcactgtgcgtgctgaccatggtgagcccattggcaggggtaccaaagtgatcctccatcttaaagaagatcagacagagtacctagaagagaggcgggtcaaagaagtagtgaagaagcattctcagttcataggctatcccatcaccctttatttggagaaggaacgagagaaggaaattagtgatgatgaggcagaggaagagaaaggtgagaaagaagaggaagataaagatgatgaagaaaaacccaagatcgaagatgtgggttcagatgaggaggatgacagcggtaaggataagaagaagaaaactaagaagatcaaagagaaatacattgatcaggaagaactaaacaagaccaagcctatttggaccagaaaccctgatgacatcacccaagaggagtatggagaattctacaagagcctcactaatgactgggaagaccacttggcagtcaagcacttttctgtagaaggtcagttggaattcagggcattgctatttattcctcgtcgggctccctttgacctttttgagaacaagaagaaaaagaacaacatcaaactctatgtccgccgtgtgttcatcatggacagctgtgatgagttgataccagagtatctcaattttatccgtggtgtggttgactctgaggatctgcccctgaacatctcccgagaaatgctccagcagagcaaaatcttgaaagtcattcgcaaaaacattgttaagaagtgccttgagctcttctctgagctggcagaagacaaggagaattacaagaaattctatgaggcattctctaaaaatctcaagcttggaatccacgaagactccactaaccgccgccgcctgtctgagctgctgcgctatcatacctcccagtctggagatgagatgacatctctgtcagagtatgtttctcgcatgaaggagacacagaagtccatctattacatcactggtgagagcaaagagcaggtggccaactcagcttttgtggagcgagtgcggaaacggggcttcgaggtggtatatatgaccgagcccattgacgagtactgtgtgcagcagctcaaggaatttgatgggaagagcctggtctcagttaccaaggagggtctggagctgcctgaggatgaggaggagaagaagaagatggaagagagcaaggcaaagtttgagaacctctgcaagctcatgaaagaaatcttagataagaaggttgagaaggtgacaatctccaatagacttgtgtcttcaccttgctgcattgtgaccagcacctacggctggacagccaatatggagcggatcatgaaagcccaggcacttcgggacaactccaccatgggctatatgatggccaaaaagcacctggagatcaaccctgaccaccccattgtggagacgctgcggcagaaggctgaggccgacaagaatgataaggcagttaaggacctggtggtgctgctgtttgaaaccgccctgctatcttctggcttttcccttgaggatccccagacccactccaaccgcatctatcgcatgatcaagctaggtctaggtattgatgaagatgaagtggcagcagaggaacccaatgctgcagttcctgatgagatcccccctctcgagggcgatgaggatgcgtctcgcatggaagaagtcgattaggttaggagttcatagttggaaaacttgtgcccttgtatagtgtccccatgggctcccactgcagcctcgagtgcccctgtcccacctggctccccctgctggtgtctagtgtttttttccctctcctgtccttgtgttgaaggcagtaaactaagggtgtcaagccccattccctctctactcttgacagcaggattggatgttgtgtattgtggtttattttattttcttcattttgttctgaaattaaagtatgcaaaataaagaatatgccgttttaaaaaaaaaaaaaaaaaaaaaaaaaaaaa

SEQ ID NO: 73 - DNA, 1637 bp, Homo sapiens
  ref <308>: DATABASE ACCESSION NUMBER: NCBI / NM_004515
  ref <309>: DATABASE ENTRY DATE: 2011-12-18
  ref <313>: RELEVANT RESIDUES IN SEQ ID NO: (1)..(1637)
ggcaagacgcctcttcagttgtctgctactcagaggaaggggcggttggtgcggcctccattgttcgtgttttaaggcgccatgaggggtgacagaggccgtggtcgtggtgggcgctttggttccagaggaggcccaggaggagggttcaggccctttgtaccacatatcccatttgacttctatttgtgtgaaatggcctttccccgggtcaagccagcacctgatgaaacttccttcagtgaggccttgctgaagaggaatcaggacctggctcccaattctgctgaacaggcatctatcctttctctggtgacaaaaataaacaatgtgattgataatctgattgtggctccagggacatttgaagtgcaaattgaagaagttcgacaggtgggatcctataaaaaggggacaatgactacaggacacaatgtggctgacctggtggtgatactcaagattctgccaacgttggaagctgttgctgccctggggaacaaagtcgtggaaagcctaagagcacaggatccttctgaagttttaaccatgctgaccaacgaaactggctttgaaatcagttcttctgatgctacagtgaagattctcattacaacagtgccacccaatcttcgaaaactggatccagaactccatttggatatcaaagtattgcagagtgccttagcagccatccgacatgcccgctggttcgaggaaaatgcttctcagtccacagttaaagttctcatcagactactgaaggacttgaggattcgttttcctggctttgagcccctcacaccctggatccttgacctactaggccattatgctgtgatgaacaaccccaccagacagcctttggccctaaacgttgcatacaggcgctgcttgcagattctggctgcaggactgttcctgccaggttcagtgggtatcactgacccctgtgagagtggcaactttagagtacacacagtcatgaccctagaacagcaggacatggtctgctatacagctcagactctcgtccgaatcctctcacatggtggctttaggaagatccttggccaggagggtgatgccagctatcttgcttctgaaatatctacctgggatggagtgatagtaacaccttcagaaaaggcttatgagaagccaccagagaagaaggaaggagaggaagaagaggagaatacagaagaaccacctcaaggagaggaagaagaaagcatggaaactcaggagtgacattcccttcactccttttcctacccaagggggaagactggagcctaagctgcctgctactgggctttacatggtgacagacatttccgtgggatagggaagatagcaggaagaaaagtaaactccatagaagtgtcattccactgggttttgatattggcttagctgccagtctcccatttgtgacctatgccatccatctataatggaggataccaacatttcttcctaatattctataatctccaactcctgaaaacccctctctcaactaatactttgctgttgaaatgttgtgaaatgttaagtgtctggaaatttttttttctaagaaaaactattaaagtacttcctagtaaaaaaaaaaaaaaaaaaaaaaaaaa

SEQ ID NO: 74 - DNA, 3300 bp, Homo sapiens
  ref <308>: DATABASE ACCESSION NUMBER: NCBI / NM_004651
  ref <309>: DATABASE ENTRY DATE: 2011-12-04
  ref <313>: RELEVANT RESIDUES IN SEQ ID NO: (1)..(3300)
atggcagtagccccgcgactgtttggggggctctgcttccgtttccgggaccagaatccggaagtggctgttgaggggcgtcttccaatctcgcacagctgcgttggctgtagaagagaacggacggcgatggcgacggtcgcagcaaatccagctgctgctgcggcggctgtggcggcggcagcggcggtgactgaggatagagagccacagcacgaggagctgccaggcctggacagccagtggcgccagatagaaaacggcgagagtgggcgagaacgtccactgcgggccggcgaaagctggttccttgtggagaagcactggtataagcagtgggaggcatacgtgcagggaggggaccaggactccagcaccttccctggctgcatcaacaatgccacactctttcaagatgagataaactggcgcctcaaggagggactggtggaaggcgaggattatgtgctgctcccagcagctgcttggcattacctggtcagctggtatggtctagagcatggccagccacccattgaacgcaaggtcatagagctgcccaacatccagaaggtcgaagtgtacccagtagaactgctgcttgtccggcacaatgatttgggcaaatctcacactgttcagttcagccataccgattctattggcctagtattgcgcacagctcgggagcggtttctggtggagccccaggaagacactcggctttgggccaagaactcagaaggctctttggataggttgtatgacacacacatcacggttctcgatgcggcccttgagactgggcagttgatcatcatggagacccgcaagaaagatggcacttggcccagcgcacagctgcatgtcatgaacaacaacatgtcggaagaggatgaggacttcaagggtcagccaggcatctgtggcctcaccaatctgggcaacacgtgcttcatgaactcggccctgcagtgcctcagcaatgtgccacagctcaccgagtacttcctcaacaactgctacctggaggagctcaacttccgcaacccactgggcatgaagggtgagatcgcagaggcctatgcagacctggtgaagcaggcgtggtctggccaccaccgctccattgtgccacatgtgttcaagaacaaggttggccattttgcatcccaatttctgggctaccagcagcatgactctcaggagctgctgtcattcctcctggacgggctgcatgaggaccttaatcgggtgaagaagaaggagtatgtggagctgtgcgatgctgctgggcgaccggatcaggaggtggcacaggaggcatggcaaaaccacaaacggcggaacgattctgtgatcgtggacactttccacggcctcttcaagtccacgctggtgtgccccgattgtggcaatgtatctgtgaccttcgaccccttctgctacctcagtgttccactgcctatcagccacaagagggtcttggaggtcttctttatccccatggatccgcgccgcaagccagagcagcaccggctcgtggtccccaagaaaggcaagatctcggatctatgtgtggctctgtccaaacacacgggcatctcgccagagaggatgatggtggctgatgtcttcagtcaccgcttctataagctctatcagctagaggagcctctgagcagcatcttggaccgtgatgatatcttcgtctatgaggtgtcaggtcgcattgaggccattgagggctcaagagaggacatcgtggttcctgtctacctgcgggagcgcacccctgcccgtgactacaacaactcctactacggcctgatgctttttggacaccccctcctggtatcagtgccccgggaccgcttcacctgggagggcctgtataacgtcctgatgtaccggctctcacgctacgtgaccaaacccaactcagatgatgaggacgatggggatgagaaagaagatgacgaggaggataaagatgacgtccctgggccctcaactgggggcagcctccgagaccctgagccagagcaggctgggcccagctctggagtcacgaacaggtgcccgttcctcctggacaattgccttggcacatctcagtggcccccaaggcgacgacgcaagcagctgttcaccctgcagacggtgaactccaatgggaccagcgaccgcacaacctcccctgaagaagtccatgcccagccgtacattgctatcgactgggagccagagatgaagaagcgttactatgacgaggtagaggctgagggctacgtgaagcatgactgcgtcgggtacgtgatgaagaaggctcccgtgcggctgcaggagtgcattgagctcttcaccactgtggagaccctggagaaggaaaacccctggtactgcccttcctgcaagcagcaccagctggcaaccaagaagctggacctgtggatgctgccggagattctcatcatccacctgaaacgcttttcctacaccaagttctcccgagagaagctggacaccctcgtggagtttcctatccgggacctggacttctctgagtttgtcatccagccacagaatgagtcgaatccggagctgtacaaatatgacctcatcgcggtttccaaccattatgggggcatgcgtgatggacactacacaacatttgcctgcaacaaggacagcggccagtggcactactttgatgacaacagcgtctcccctgtcaatgagaatcagatcgagtccaaggcagcctatgtcctcttctaccaacgccaggacgtggcgcgacgcctgctgtccccggccggctcatctggcgccccagcctcccctgcctgcagctccccacccagctctgagttcatggatgttaattgagagccctgggtcctgccacagaaaaaaaaaaaaaaaagccctctctgcaatctcgcttctcgtgtccgccccgcttctcttattcgtgttaggtgcccccgccaggcattgcaggcttagtcgtggctactgttctcctgtgccgctgcatcgctctctcccgggaaagaacaggtcgtgtctcctcctagcagtgcgcgccccgcctgtgtttgcccttccagcagtgaccctcccttctagtctttatttatggtcgtgcccttccctctcctcagcccagagtgttctgcgtgggtggtgatgggggttcacctgaacacagagtgtattttcttattgaggccctgtaccttctgctgtgtgtgtgtatatataaagcaccagtctgctccccaaaaaaaaaaa

SEQ ID NO: 75 - DNA, 1611 bp, Homo sapiens
  ref <308>: DATABASE ACCESSION NUMBER: NCBI / NM_004888
  ref <309>: DATABASE ENTRY DATE: 2011-12-04
  ref <313>: RELEVANT RESIDUES IN SEQ ID NO: (1)..(1611)
gtgacaacgggggcgaagcgcaggcgcaaggagcaagcgcagattgtgggcggctgtgtcagctgacccaaggggccttcgaggtgccttaggccgcttgccttgctctcagaatcgctgccgccatggctagtcagtctcaggggattcagcagctgctgcaggccgagaagcgggcagccgagaaggtgtccgaggcccgcaaaagaaagaaccggaggctgaagcaggccaaagaagaagctcaggctgaaattgaacagtaccgcctgcagagggagaaagaattcaaggccaaggaagctgcggcattgggatcccgtggcagttgcagcactgaagtggagaaggagacccaggagaagatgaccatcctccagacatacttccggcagaacagggatgaagtcttggacaacctcttggcttttgtctgtgacattcggccagaaatccatgaaaactaccgcataaatggatagaagagagaagcacctgtgctgtggagtggcattttagatgccctcacgaatatgaagcttagcacagctctagttacattcttatgatatggcattaaattatttccatatattatataataggtccttccactttttggagagtagcaaatctagcttttttgtacagacttagaaattatctaaagatttcatctttttacctcatatttcttaggaatttaatggttatatgttgtctttttttcctatgtcttttggctcaagcaacatgtatatcagtgttgactttttctttcttagatctagtttaaaaaaaaaaaaaaccacataacaattctttgaagaaaggaagggattaaataatttttttccctaacactttcttgaaggtcaggggctttatctatgaaaaagtagtaaatagttctttgtaacctgtgtgaagcagcagccagccttaaagtagtccattcttgctaatggttagaacagtgaatactagtggaattgtttgggctgcttttagtttctcttaatcaaaattactagatgatagaattcaagaacttgttacatgtattacttggtgtatcgataatcatttaaaagtaaagactctgtcatgcatttttccccattcttttttttttccctgtctccgtgacaaccagtggttcttcatttttgatcatgcgaaatgcattttgacccagatggtctgcagaacttcacttaggacattagcacacaaatagcacacatatcacatacccatttatatacataattagaaaatgttcctgatacatgtgtcatgtgatttcttccaacaaatgttttggaaaacagcaagcaactagtctgtaggttgtcttttctctagagatccttgtcctgggacagcctggggcaagttattaagcatatttccttcctggtgggctagatgatgtgcattatacctgtagtaccttcatactagcccttacaagttaaatgtcctgtggccatcttagccgaaagtctttggttgcaaaatcttataggtaaaaacagttgaaagaacattatgggatttccttgcttgttctgatacaatacaactagatgaccttaaaaaccctca

SEQ ID NO: 76 - DNA, 3616 bp, Homo sapiens
  ref <308>: DATABASE ACCESSION NUMBER: NCBI / NM_003334
  ref <309>: DATABASE ENTRY DATE: 2011-11-26
  ref <313>: RELEVANT RESIDUES IN SEQ ID NO: (1)..(3616)
gttccggccccaggctcagcgtccgccatcttgtgtcggcggctcggctgtaaggaggtggcagggacaaccacaaccacaacggccgggggaggagaaggcggcagcggcgattctaggcggcccaggcggcggggaggaggagaaggaggagggtggcggccgggcttggcttcggctccttgaggagttggcggcggcgcgacccggggaaccggcattgatgtccagctcgccgctgtccaagaaacgtcgcgtgtccgggcctgatccaaagccgggttctaactgctcccctgcccagtccgtgttgtccgaagtgccctcggtgccaaccaacggaatggccaagaacggcagtgaagcagacatagacgagggcctttactcccggcagctgtatgtgttgggccatgaggcaatgaagcggctccagacatccagtgtcctggtatcaggcctgcggggcctgggcgtggagatcgctaagaacatcatccttggtggggtcaaggctgttaccctacatgaccagggcactgcccagtgggctgatctttcctcccagttctacctgcgggaggaggacatcggtaaaaaccgggccgaggtatcacagccccgcctcgctgagctcaacagctatgtgcctgtcactgcctacactggacccctcgttgaggacttccttagtggtttccaggtggtggtgctcaccaacacccccctggaggaccagctgcgagtgggtgagttctgtcacaaccgtggcatcaagctggtggtggcagacacgcggggcctgtttgggcagctcttctgtgactttggagaggaaatgatcctcacagattccaatggggagcagccactcagtgctatggtttctatggttaccaaggacaaccccggtgtggttacctgcctggatgaggcccgacacgggtttgagagcggggactttgtctccttttcagaagtacagggcatggttgaactcaacggaaatcagcccatggagatcaaagtcctgggtccttatacctttagcatctgtgacacctccaacttctccgactacatccgtggaggcatcgtcagtcaggtcaaagtacctaagaagattagctttaaatccttggtggcctcactggcagaacctgactttgtggtgacggacttcgccaagttttctcgccctgcccagctgcacattggcttccaggccctgcaccagttctgtgctcagcatggccggccacctcggccccgcaatgaggaggatgcagcagaactggtagccttagcacaggctgtgaatgctcgagccctgccagcagtgcagcaaaataacctggacgaggacctcatccggaagctggcatatgtggctgctggggatctggcacccataaacgccttcattgggggcctggctgcccaggaagtcatgaaggcctgctccgggaagttcatgcccatcatgcagtggctatactttgatgcccttgagtgtctccctgaggacaaagaggtcctcacagaggacaagtgcctccagcgccagaaccgttatgacgggcaagtggctgtgtttggctcagacctgcaagagaagctgggcaagcagaagtatttcctggtgggtgcgggggccattggctgtgagctgctcaagaactttgccatgattgggctgggctgcggggagggtggagaaatcatcgttacagacatggacaccattgagaagtcaaatctgaatcgacagtttcttttccggccctgggatgtcacgaagttaaagtctgacacggctgctgcagctgtgcgccaaatgaatccacatatccgggtgacaagccaccagaaccgtgtgggtcctgacacggagcgcatctatgatgacgattttttccaaaacctagatggcgtggccaatgccctggacaacgtggatgcccgcatgtacatggaccgccgctgtgtctactaccggaagccactgctggagtcaggcacactgggcaccaaaggcaatgtgcaggtggtgatccccttcctgacagagtcgtacagttccagccaggacccacctgagaagtccatccccatctgtaccctgaagaacttccctaatgccatcgagcacaccctgcagtgggctcgggatgagtttgaaggcctcttcaagcagccagcagaaaatgtcaaccagtacctcacagaccccaagtttgtggagcgaacactgcggctggcaggcactcagcccttggaggtgctggaggctgtgcagcgcagcctggtgctgcagcgaccacagacctgggctgactgcgtgacctgggcctgccaccactggcacacccagtactcgaacaacatccggcagctgctgcacaacttccctcctgaccagctcacaagctcaggagcgccgttctggtctgggcccaaacgctgtccacacccgctcacctttgatgtcaacaatcccctgcatctggactatgtgatggctgctgccaacctgtttgcccagacctacgggctgacaggctctcaggaccgagctgctgtggccacattcctgcagtctgtgcaggtccccgaattcacccccaagtctggcgtcaagatccatgtttctgaccaggagctgcagagcgccaatgcctctgttgatgacagtcgtctagaggagctcaaagccactctgcccagcccagacaagctccctggattcaagatgtaccccattgactttgagaaggatgatgacagcaactttcatatggatttcatcgtggctgcatccaacctccgggcagaaaactatgacattccttctgcagaccggcacaagagcaagctgattgcagggaagatcatcccagccattgccacgaccacagcagccgtggttggccttgtgtgtctggagctgtacaaggttgtgcaggggcaccgacagcttgactcctacaagaatggtttcctcaacttggccctgcctttctttggtttctctgaaccccttgccgcaccacgtcaccagtactataaccaagagtggacattgtgggatcgctttgaggtacaagggctgcagcctaatggtgaggagatgaccctcaaacagttcctcgactattttaagacagagcacaaattagagatcaccatgctgtcccagggcgtgtccatgctctattccttcttcatgccagctgccaagctcaaggaacggttggatcagccgatgacagagattgtgagccgtgtgtcgaagcgaaagctgggccgccacgtgcgggcgctggtgcttgagctgtgctgtaacgacgagagcggcgaggatgtcgaggttccctatgtccgatacaccatccgctgaccccgtctgctcctctaggctggccccttgtccacccctctccacaccccttccagcccagggttcccatttggcttctggcagtggcccaactagccaagtctggtgttccctcatcatccccctacctgaacccctcttgccactgccttctaccttgtttgaaacctgaatcctaataaagaattaataactcccaaaaaaaaaaaaaaaaaa

SEQ ID NO: 77 - DNA, 1128 bp, Homo sapiens
  ref <308>: DATABASE ACCESSION NUMBER: NCBI / NM_001320
  ref <309>: DATABASE ENTRY DATE: 2011-12-17
  ref <313>: RELEVANT RESIDUES IN SEQ ID NO: (1)..(1128)
gcttctcgttgtgccccgcccgcaagcgccctcctccgggccttcgtgacagccaggtcgtgcgcgggtcatcctgggattggtagttcgctttctctcatttagccagtttctttctctaccggggactccgtgtcccggcatccaccgcggcacctgacccttggcgcttgcgtgttgccctcttccccaccctccctaatttccactccccccaccccacttcgcctgccgcggtcgggtccgcggcctgcgctgtagcggtcgccgccgttccctggaagtagcaacttccctaccccaccccagtcctggtccccgtccagccgctgacgtgaagatgagcagctcagaggaggtgtcctggatttcctggttctgtgggctccgtggcaatgaattcttctgtgaagtggatgaagactacatccaggacaaatttaatcttactggactcaatgagcaggtccctcactaccgacaagctctagacatgatcttggacctggagcctgatgaagaactggaagacaaccccaaccagagtgacctgattgagcaggcagccgagatgctttatggattgatccacgcccgctacatccttaccaaccgtggcatcgcccagatgttggaaaagtaccagcaaggagactttggttactgtcctcgtgtgtactgtgagaaccagccaatgcttcccattggcctttcagacatcccaggtgaagccatggtgaagctctactgccccaagtgcatggatgtgtacacacccaagtcatcaagacaccatcacacggatggcgcctacttcggcactggtttccctcacatgctcttcatggtgcatcccgagtaccggcccaagagacctgccaaccagtttgtgcccaggctctacggtttcaagatccatccgatggcctaccagctgcagctccaagccgccagcaacttcaagagcccagtcaagacgattcgctgattccctcccccacctgtcctgcagtctttgacttttcctttcttttttgccaccctttcaggaaccctgtatggtttttagtttaaattaaaggagtcgttattgtggtgggaatatgaaataaagtagaagaaaaggcc

SEQ ID NO: 78 - DNA, 2207 bp, Homo sapiens
  ref <308>: DATABASE ACCESSION NUMBER: NCBI / NM_003915
  ref <309>: DATABASE ENTRY DATE: 2011-12-19
  ref <313>: RELEVANT RESIDUES IN SEQ ID NO: (1)..(2207)
ggcgaaggctttgtagagttcagaaatgaggctgactataaggctgctctgtgtcgtcataaacagtacatgggcaatcgctttattcaagttcatccaattactaagaaaggtatgctagaaaagatagatatgattcgaaaaagactgcagaacttcagctatgaccagagggaaatgatactaaatccagagggggatgtcaactctgccaaagtctgtgcccacataacaaatattccattcagcattacaaagatggatgttcttcagttcctagaaggaatcccagtggatgaaaatgctgtacatgttcttgttgataacaatgggcaaggtctaggacaggcattggttcagtttaaaaatgaagatgatgcacatggcccactgcgtgaccttggttcagctgtccatttcctgtgaccatctcattgacaaggacatcggctccaagtctgacccactctgcgtccttttacaggatgtgggagggggcagctgggctgagcttggccggactgaacgggtgcggaactgctcaagccctgagttctccaagactctacagcttgagtaccgctttgagacagtccagaagctacgctttggaatctatgacatagacaacaagacgccagagctgagggatgatgacttcctagggggtgctgagtgttccctaggacagattgtgtccagccaggtactgactctccccttgatgctgaagcctggaaaacctgctgggcgggggaccatcacggtctcagctcaggaattaaaggacaatcgtgtagtaaccatggaggtagaggccagaaacctagataagaaggacttcctgggaaaatcagatccatttctggagttcttccgccagggtgatgggaaatggcacctggtgtacagatctgaggtcatcaagaacaacctgaaccctacatggaagcgtttctcagtccccgttcagcatttctgtggtgggaaccccagcacacccatccaggtgcaatgctccgattatgacagtgacgggtcacatgatctcatcggtaccttccacaccagcttggcccagctgcaggcagtcccggctgagtttgaatgcatccaccctgagaagcagcagaaaaagaaaagctacaagaactctggaactatccgtgtcaagatttgtcgggtagaaacagagtactcctttctggactatgtgatgggaggctgtcagatcaacttcactgtgggcgtggacttcactggctccaatggagacccctcctcacctgactccctacactacctgagtccaacaggggtcaatgagtacctgatggcactgtggagtgtgggcagcgtggttcaggactatgactcagacaagctgttccctgcatttggatttggggcccaggttccccctgactggcaggtctcgcatgaatttgccttgaatttcaaccccagtaacccctactgtgcaggcatccagggcattgtggatgcctaccgccaagccctgccccaagttcgcctctatggccctaccaactttgcacccatcatcaaccatgtggccaggtttgcagcccaggctgcacatcaggggactgcctcgcaatacttcatgctgttgctgctgactgatggtgctgtgacggatgtggaagccacacgtgaggctgtggtgcgtgcctcgaacctgcccatgtcagtgatcattgtgggtgtgggtggtgctgactttgaggccatggagcagctggacgctgatggtggacccctgcatacacgttctgggcaggctgctgcccgcgacattgtgcagtttgtaccctaccgccggttccagaatgcccctcgggaggcattggcacagaccgtgctcgcagaagtgcccacacaactggtctcatacttcagggcccagggttgggccccgctcaagccacttccaccctcagccaaggatcctgcacaggccccccaggcctaggttcccttggaggctgtggcaagtcctcaatcctgtgtcccagaggtccctctgggccacaacccaacccttctcactctcctcagtgctagcactttgtattttttgatacttttatacttgtttctgcttttgctgctcttgatcccacctttgctcctgacaaccctcattcaataaagaccagtgaagaccaatgctttgccaccaa

SEQ ID NO: 79 - DNA, 1616 bp, Homo sapiens
  ref <308>: DATABASE ACCESSION NUMBER: NCBI / NM_001250
  ref <309>: DATABASE ENTRY DATE: 2011-12-25
  ref <313>: RELEVANT RESIDUES IN SEQ ID NO: (1)..(1616)
gccaaggctggggcaggggagtcagcagaggcctcgctcgggcgcccagtggtcctgccgcctggtctcacctcgctatggttcgtctgcctctgcagtgcgtcctctggggctgcttgctgaccgctgtccatccagaaccacccactgcatgcagagaaaaacagtacctaataaacagtcagtgctgttctttgtgccagccaggacagaaactggtgagtgactgcacagagttcactgaaacggaatgccttccttgcggtgaaagcgaattcctagacacctggaacagagagacacactgccaccagcacaaatactgcgaccccaacctagggcttcgggtccagcagaagggcacctcagaaacagacaccatctgcacctgtgaagaaggctggcactgtacgagtgaggcctgtgagagctgtgtcctgcaccgctcatgctcgcccggctttggggtcaagcagattgctacaggggtttctgataccatctgcgagccctgcccagtcggcttcttctccaatgtgtcatctgctttcgaaaaatgtcacccttggacaagctgtgagaccaaagacctggttgtgcaacaggcaggcacaaacaagactgatgttgtctgtggtccccaggatcggctgagagccctggtggtgatccccatcatcttcgggatcctgtttgccatcctcttggtgctggtctttatcaaaaaggtggccaagaagccaaccaataaggccccccaccccaagcaggaaccccaggagatcaattttcccgacgatcttcctggctccaacactgctgctccagtgcaggagactttacatggatgccaaccggtcacccaggaggatggcaaagagagtcgcatctcagtgcaggagagacagtgaggctgcacccacccaggagtgtggccacgtgggcaaacaggcagttggccagagagcctggtgctgctgctgctgtggcgtgagggtgaggggctggcactgactgggcatagctccccgcttctgcctgcacccctgcagtttgagacaggagacctggcactggatgcagaaacagttcaccttgaagaacctctcacttcaccctggagcccatccagtctcccaacttgtattaaagacagaggcagaagtttggtggtggtggtgttggggtatggtttagtaatatccaccagaccttccgatccagcagtttggtgcccagagaggcatcatggtggcttccctgcgcccaggaagccatatacacagatgcccattgcagcattgtttgtgatagtgaacaactggaagctgcttaactgtccatcagcaggagactggctaaataaaattagaatatatttatacaacagaatctcaaaaacactgttgagtaaggaaaaaaaggcatgctgctgaatgatgggtatggaactttttaaaaaagtacatgcttttatgtatgtatattgcctatggatatatgtataaatacaatatgcatcatatattgatataacaagggttctggaagggtacacagaaaacccacagctcgaagagtggtgacgtctggggtggggaagaagggtctggggg

SEQ ID NO: 80 - DNA, 3720 bp, Homo sapiens
  ref <308>: DATABASE ACCESSION NUMBER: NCBI / NM_001904
  ref <309>: DATABASE ENTRY DATE: 2011-12-18
  ref <313>: RELEVANT RESIDUES IN SEQ ID NO: (1)..(3720)
aggatacagcggcttctgcgcgacttataagagctccttgtgcggcgccattttaagcctctcggtctgtggcagcagcgttggcccggccccgggagcggagagcgaggggaggcggagacggaggaaggtctgaggagcagcttcagtccccgccgagccgccaccgcaggtcgaggacggtcggactcccgcggcgggaggagcctgttcccctgagggtatttgaagtataccatacaactgttttgaaaatccagcgtggacaatggctactcaagctgatttgatggagttggacatggccatggaaccagacagaaaagcggctgttagtcactggcagcaacagtcttacctggactctggaatccattctggtgccactaccacagctccttctctgagtggtaaaggcaatcctgaggaagaggatgtggatacctcccaagtcctgtatgagtgggaacagggattttctcagtccttcactcaagaacaagtagctgatattgatggacagtatgcaatgactcgagctcagagggtacgagctgctatgttccctgagacattagatgagggcatgcagatcccatctacacagtttgatgctgctcatcccactaatgtccagcgtttggctgaaccatcacagatgctgaaacatgcagttgtaaacttgattaactatcaagatgatgcagaacttgccacacgtgcaatccctgaactgacaaaactgctaaatgacgaggaccaggtggtggttaataaggctgcagttatggtccatcagctttctaaaaaggaagcttccagacacgctatcatgcgttctcctcagatggtgtctgctattgtacgtaccatgcagaatacaaatgatgtagaaacagctcgttgtaccgctgggaccttgcataacctttcccatcatcgtgagggcttactggccatctttaagtctggaggcattcctgccctggtgaaaatgcttggttcaccagtggattctgtgttgttttatgccattacaactctccacaaccttttattacatcaagaaggagctaaaatggcagtgcgtttagctggtgggctgcagaaaatggttgccttgctcaacaaaacaaatgttaaattcttggctattacgacagactgccttcaaattttagcttatggcaaccaagaaagcaagctcatcatactggctagtggtggaccccaagctttagtaaatataatgaggacctatacttacgaaaaactactgtggaccacaagcagagtgctgaaggtgctatctgtctgctctagtaataagccggctattgtagaagctggtggaatgcaagctttaggacttcacctgacagatccaagtcaacgtcttgttcagaactgtctttggactctcaggaatctttcagatgctgcaactaaacaggaagggatggaaggtctccttgggactcttgttcagcttctgggttcagatgatataaatgtggtcacctgtgcagctggaattctttctaacctcacttgcaataattataagaacaagatgatggtctgccaagtgggtggtatagaggctcttgtgcgtactgtccttcgggctggtgacagggaagacatcactgagcctgccatctgtgctcttcgtcatctgaccagccgacaccaagaagcagagatggcccagaatgcagttcgccttcactatggactaccagttgtggttaagctcttacacccaccatcccactggcctctgataaaggctactgttggattgattcgaaatcttgccctttgtcccgcaaatcatgcacctttgcgtgagcagggtgccattccacgactagttcagttgcttgttcgtgcacatcaggatacccagcgccgtacgtccatgggtgggacacagcagcaatttgtggagggggtccgcatggaagaaatagttgaaggttgtaccggagcccttcacatcctagctcgggatgttcacaaccgaattgttatcagaggactaaataccattccattgtttgtgcagctgctttattctcccattgaaaacatccaaagagtagctgcaggggtcctctgtgaacttgctcaggacaaggaagctgcagaagctattgaagctgagggagccacagctcctctgacagagttacttcactctaggaatgaaggtgtggcgacatatgcagctgctgttttgttccgaatgtctgaggacaagccacaagattacaagaaacggctttcagttgagctgaccagctctctcttcagaacagagccaatggcttggaatgagactgctgatcttggacttgatattggtgcccagggagaaccccttggatatcgccaggatgatcctagctatcgttcttttcactctggtggatatggccaggatgccttgggtatggaccccatgatggaacatgagatgggtggccaccaccctggtgctgactatccagttgatgggctgccagatctggggcatgcccaggacctcatggatgggctgcctccaggtgacagcaatcagctggcctggtttgatactgacctgtaaatcatcctttaggtaagaagttttaaaaagccagtttgggtaaaatacttttactctgcctacagaacttcagaaagacttggttggtagggtgggagtggtttaggctatttgtaaatctgccacaaaaacaggtatatactttgaaaggagatgtcttggaacattggaatgttctcagatttctggttgttatgtgatcatgtgtggaagttattaactttaatgttttttgccacagcttttgcaacttaatactcaaatgagtaacatttgctgttttaaacattaatagcagcctttctctctttatacagctgtattgtctgaacttgcattgtgattggcctgtagagttgctgagagggctcgaggggtgggctggtatctcagaaagtgcctgacacactaaccaagctgagtttcctatgggaacaattgaagtaaactttttgttctggtcctttttggtcgaggagtaacaatacaaatggattttgggagtgactcaagaagtgaagaatgcacaagaatggatcacaagatggaatttatcaaaccctagccttgcttgttaaatttttttttttttttttttaagaatatctgtaatggtactgactttgcttgctttgaagtagctctttttttttttttttttttttttttgcagtaactgttttttaagtctctcgtagtgttaagttatagtgaatactgctacagcaatttctaatttttaagaattgagtaatggtgtagaacactaattcataatcactctaattaattgtaatctgaataaagtgtaacaattgtgtagcctttttgtataaaatagacaaatagaaaatggtccaattagtttcctttttaatatgcttaaaataagcaggtggatctatttcatgtttttgatcaaaaactatttgggatatgtatgggtagggtaaatcagtaagaggtgttatttggaaccttgttttggacagtttaccagttgccttttatcccaaagttgttgtaacctgctgtgatacgatgcttcaagagaaaatgcggttataaaaaatggttcagaattaaacttttaattcattcgattg

SEQ ID NO: 81 - DNA, 1949 bp, Homo sapiens
  ref <308>: DATABASE ACCESSION NUMBER: NCBI / NM_003753
  ref <309>: DATABASE ENTRY DATE: 2011-11-21
  ref <313>: RELEVANT RESIDUES IN SEQ ID NO: (1)..(1949)
gggagagcagtttacgacagcgccggtcgtgtttacggcggcgcccgctgcgcgcgcatgtttcctcttttcctggtttctcaagagtgctgctgctaacgcggtccccggcacgcaccatctgttgccatcccggccggccgaggccattgcagattttggaagatggcaaagttcatgacacccgtgatccaggacaacccctcaggctggggtccctgtgcggttcccgagcagtttcgggatatgccctaccagccgttcagcaaaggagatcggctaggaaaggttgcagactggacaggagccacataccaagataagaggtacacaaataagtactcctctcagtttggtggtggaagtcaatatgcttatttccatgaggaggatgaaagtagcttccagctggtggatacagcgcgcacacagaagacggcctaccagcggaatcgaatgagatttgcccagaggaacctccgcagagacaaagatcgtcggaacatgttgcagttcaacctgcagatcctgcctaagagtgccaaacagaaagagagagaacgcattcgactgcagaaaaagttccagaaacaatttggggttaggcagaaatgggatcagaaatcacagaaaccccgagactcttcagttgaagttcgtagtgattgggaagtgaaagaggaaatggattttcctcagttgatgaagatgcgctacttggaagtatcagagccacaggacattgagtgttgtggggccctagaatactacgacaaagcctttgaccgcatcaccacgaggagtgagaagccactgcggagcatcaagcgcatcttccacactgtcaccaccacagacgaccctgtcatccgcaagctggcaaaaactcaggggaatgtgtttgccactgatgccatcctggccacgctgatgagctgtacccgctcagtgtattcctgggatattgtcgtccagagagttgggtccaaactcttctttgacaagagagacaactctgactttgacctcctgacagtgagtgagactgccaatgagccccctcaagatgaaggtaattccttcaattcaccccgcaacctggccatggaggcaacctacatcaaccacaatttctcccagcagtgcttgagaatggggaaggaaagatacaacttccccaacccaaacccgtttgtggaggacgacatggataagaatgaaatcgcctctgttgcgtaccgttaccgcaggtggaagcttggagatgatattgaccttattgtccgttgtgagcacgatggcgtcatgactggagccaacggggaagtgtccttcatcaacatcaagacactcaatgagtgggattccaggcactgtaatggcgttgactggcgtcagaagctggactctcagcgaggggctgtcattgccacggagctgaagaacaacagctacaagttggcccggtggacctgctgtgctttgctggctggatctgagtacctcaagcttggttatgtgtctcggtaccacgtgaaagactcctcacgccacgtcatcctaggcacccagcagttcaagcctaatgagtttgccagccagatcaacctgagcgtggagaatgcctggggcattttacgctgcgtcattgacatctgcatgaagctggaggagggcaaatacctcatcctcaaggaccccaacaagcaggtcatccgtgtctacagcctccctgatggcaccttcagctctgatgaagatgaggaggaagaggaggaggaagaagaggaagaagaagaggaagaaacttaaaccagtgatgtggagctggagtttgtccttccaccgagactacgagggcctttgatgcttagtggaatgtgtgtctaacttgctctctgacatttagcagatgaaataaaatatatatctgtttagtctttccctca

SEQ ID NO: 82 - DNA, 502 bp, Homo sapiens
  ref <308>: DATABASE ACCESSION NUMBER: NCBI / NM_004541
  ref <309>: DATABASE ENTRY DATE: 2011-11-26
  ref <313>: RELEVANT RESIDUES IN SEQ ID NO: (1)..(502)
agattccgtcgcttcttccggagccgtacgtggcaccgccccgctcgcgggcggccgcggggcttgctgggaagagaggcgaagccaggtcacctttcaaggacccagaagtagggttttggcctaggtaacggggcagagatgtggttcgagattctccccggactctccgtcatgggcgtgtgcttgttgattccaggactggctactgcgtacatccacaggttcactaacgggggcaaggaaaaaagggttgctcattttgggtatcactggagtctgatggaaagagataggcgcatctctggagttgatcgttactatgtgtcaaagggtttggagaacattgattaaggaagcattttcctgattgatgaaaaaaataactcagttatggccatctacccctgctagaaggttacagtgtattatgtagcatgcaatgtgttatgtagtgcttaataaaaataaaatgaaaaaaatgcaaaaaaaaaaaaaaaaa

SEQ ID NO: 83 - DNA, 2503 bp, Homo sapiens
  ref <308>: DATABASE ACCESSION NUMBER: NCBI / NM_001654
  ref <309>: DATABASE ENTRY DATE: 2011-11-28
  ref <313>: RELEVANT RESIDUES IN SEQ ID NO: (1)..(2503)
tgacccaataagggtggaaggctgagtcccgcagagccaataacgagagtccgagaggcgacggaggcggactctgtgaggaaacaagaagagaggcccaagatggagacggcggcggctgtagcggcgtgacaggagccccatggcacctgcccagccccacctcagcccatcttgacaaaatctaaggctccatggagccaccacggggcccccctgccaatggggccgagccatcccgggcagtgggcaccgtcaaagtatacctgcccaacaagcaacgcacggtggtgactgtccgggatggcatgagtgtctacgactctctagacaaggccctgaaggtgcggggtctaaatcaggactgctgtgtggtctaccgactcatcaagggacgaaagacggtcactgcctgggacacagccattgctcccctggatggcgaggagctcattgtcgaggtccttgaagatgtcccgctgaccatgcacaattttgtacggaagaccttcttcagcctggcgttctgtgacttctgccttaagtttctgttccatggcttccgttgccaaacctgtggctacaagttccaccagcattgttcctccaaggtccccacagtctgtgttgacatgagtaccaaccgccaacagttctaccacagtgtccaggatttgtccggaggctccagacagcatgaggctccctcgaaccgccccctgaatgagttgctaaccccccagggtcccagcccccgcacccagcactgtgacccggagcacttccccttccctgccccagccaatgcccccctacagcgcatccgctccacgtccactcccaacgtccatatggtcagcaccacggcccccatggactccaacctcatccagctcactggccagagtttcagcactgatgctgccggtagtagaggaggtagtgatggaaccccccgggggagccccagcccagccagcgtgtcctcggggaggaagtccccacattccaagtcaccagcagagcagcgcgagcggaagtccttggccgatgacaagaagaaagtgaagaacctggggtaccgggactcaggctattactgggaggtaccacccagtgaggtgcagctgctgaagaggatcgggacgggctcgtttggcaccgtgtttcgagggcggtggcatggcgatgtggccgtgaaggtgctcaaggtgtcccagcccacagctgagcaggcccaggctttcaagaatgagatgcaggtgctcaggaagacgcgacatgtcaacatcttgctgtttatgggcttcatgacccggccgggatttgccatcatcacacagtggtgtgagggctccagcctctaccatcacctgcatgtggccgacacacgcttcgacatggtccagctcatcgacgtggcccggcagactgcccagggcatggactacctccatgccaagaacatcatccaccgagatctcaagtctaacaacatcttcctacatgaggggctcacggtgaagatcggtgactttggcttggccacagtgaagactcgatggagcggggcccagcccttggagcagccctcaggatctgtgctgtggatggcagctgaggtgatccgtatgcaggacccgaacccctacagcttccagtcagacgtctatgcctacggggttgtgctctacgagcttatgactggctcactgccttacagccacattggctgccgtgaccagattatctttatggtgggccgtggctatctgtccccggacctcagcaaaatctccagcaactgccccaaggccatgcggcgcctgctgtctgactgcctcaagttccagcgggaggagcggcccctcttcccccagatcctggccacaattgagctgctgcaacggtcactccccaagattgagcggagtgcctcggaaccctccttgcaccgcacccaggccgatgagttgcctgcctgcctactcagcgcagcccgccttgtgccttaggccccgcccaagccaccagggagccaatctcagccctccacgccaaggagccttgcccaccagccaatcaatgttcgtctctgccctgatgctgcctcaggatcccccattccccaccctgggagatgagggggtccccatgtgcttttccagttcttctggaattgggggacccccgccaaagactgagccccctgtctcctccatcatttggtttcctcttggctttggggatacttctaaattttgggagctcctccatctccaatggctgggatttgtggcagggattccactcagaacctctctggaatttgtgcctgatgtgccttccactggattttggggttcccagcaccccatgtggattttggggggtcccttttgtgtctcccccgccattcaaggactcctctctttcttcaccaagaagcacagaattctgctgggcctttgcttgtttaaaaaaaaaaaaaaaaaaaaaaaaa

SEQ ID NO: 84 - DNA, 3115 bp, Homo sapiens
  ref <308>: DATABASE ACCESSION NUMBER: NCBI / NM_002967
  ref <309>: DATABASE ENTRY DATE: 2011-12-19
  ref <313>: RELEVANT RESIDUES IN SEQ ID NO: (1)..(3115)
gtgcagttgcaaccgggatactagaacctacgcttggtgcgcctgcgcagaagcgaggcgcgctggggcgactggagcggttccctcgcaggcggcgccattttgtgctaggagcctgataaaaccggcccggttctgtggaaagtgggcggcggagccagggtccctggaatggcggagactctgtcaggcctaggtgattctggagcggcgggcgcggcggctctgagctccgcctcgtcagagaccgggacgcggcgcctcagcgacctgcgagtgatcgatctgcgggcggagctgaggaaacggaatgtggactcgagcggcaacaagagcgttttgatggagcggctgaagaaggcaattgaagatgaaggtggtaatcctgacgaaattgaaattacctccgagggaaacaagaaaacatcaaagaggtctagcaaagggcgcaaaccagaagaagagggtgtggaagataacgggctggaggaaaactctggggatggacaggaggatgttgagaccagtctggagaacttgcaggacatcgacatcatggatatcagtgtgttggatgaagcagaaattgataatggaagcgttgcagattgtgtcgaagacgatgatgctgataacctccaggagtccctgtcggatagtagagagctagtcgagggggaaatgaaagagcttccggagcagcttcaggaacatgctatagaggacaaagaaactataaacaatttagatacttcatcatctgacttcactatattacaggaaattgaagagccatccctggagccagaaaatgagaaaatactcgacattttgggggaaacttgtaaatctgagccagtaaaagaagaaagttccgagctggagcagccatttgcacaggacacaagtagcgtggggccagacagaaagcttgcggaggaagaggacctatttgacagcgcccatccggaagagggtgatttagatttggccagcgagtcaacagcacacgctcagtcgagcaaggcagacagcctgttagcggtagtgaaaagggagcccgcggagcagccaggcgatggcgagaggacggactgtgagcctgtagggctagagccggcagttgagcagagtagtgcggcctccgagctcgcggaggcctctagcgaggagctcgcagaagcacccacggaagccccaagcccagaagccagagatagcaaagaagacgggaggaagtttgattttgacgcttgtaatgaagtccctccggctcctaaagagtcctcaaccagtgagggcgctgatcagaaaatgagttctcccgaagatgactcggatacaaaaaggctttccaaagaggaaaagggtcgcagcagttgtggtagaaatttctgggttagtggactctcttctacaaccagagctacagatttgaagaatcttttcagcaaatatgggaaggtggtgggcgccaaggttgtgacaaatgcccggagtcctggagctcgctgttacggttttgtcacgatgtccacagcagaagaggccacaaaatgcattaaccacctgcacaagacggagctccacggaaagatgatctccgtggagaaagccaaaaatgaacctgtgggaaagaaaacctctgacaaaagagacagtgacgggaaaaaggagaagtcgagcaacagtgacagatctacaaaccttaagagggatgataaatgtgacagaaaagatgatgctaagaagggtgacgacggaagtggagaaaagagtaaggaccaagatgatcagaaacctggcccctcagagcgatctcgagccacaaagtcaggaagtcgagggaccgaacggactgtagtaatggataaatccaaaggggtgcctgtgattagtgtaaaaacgtccgggtccaaagagagagcttccaaaagccaggatcgcaaatcagccagcagagagaagcggtccgtcgtgtcctttgataaggtcaaggagcctcggaagtcaagagactcagagtcccatagcagggtgcgtgaacgcagtgaacgcgaacaacgcatgcaggcgcagtgggagcgcgaggagcgtgagcggctggagattgcccgagagaggctggccttccagcgccagcggctggagcgggagcgcatggagcgggaacggctggagcgcgaacgcatgcacgtggagcacgagcgcaggcgcgagcaggagcgcatccaccgtgagcgcgaggagctgaggcgccagcaggaactgcgctatgagcaggagcggcggcccgcggtgcggcggccctacgacctggaccggcgagatgatgcctattggccggaagccaagcgggccgccctggatgagcgctaccattctgactttaaccgccaggaccgcttccacgactttgaccacagggaccgcggccgctaccccgaccactcggtggacaggagagaaggttcaaggtcaatgatgggagaacgagaaggacagcattacccagaacgccatggaggaccagagcgccacggccgggactcccgcgatggctgggggggctatggctctgacaagaggatgagcgagggccgggggctgcctcctccccccagacgtgactggggggaccatggccgaagagaggatgaccggtcatggcagggcacggccgacgggggcatgatggacagggatcacaagaggtggcaaggtggcgagagaagcatgtccggtcactccgggcctggccacatgatgaaccgaggaggaatgtcagggcgcggcagctttgccccaggcggggcctcccggggccaccccatcccacacggtggcatgcagggcgggtttggaggccagagccgggggagcaggcccagcgatgcccgcttcactcgccgctactgagtacttggaatcctgtgtcctgtctcgtggcaacaaggctatgttctgttaggagttaccttaaactgtgtaaaaatatttttttttaatctgctgccatattgtagctcaatacaatgtgaatttgtttttcgttttggggttttttttttttgtaataaatgtgtttccgttcacataccctttaaaaaaaaaa

SEQ ID NO: 85 - DNA, 2109 bp, Homo sapiens
  ref <308>: DATABASE ACCESSION NUMBER: NCBI / NM_001183
  ref <309>: DATABASE ENTRY DATE: 2011-11-21
  ref <313>: RELEVANT RESIDUES IN SEQ ID NO: (1)..(2109)
gggggcaacggtcacctgatctgcggctgtcgaggccgctgaggcagtggaggctgaggctatgatggcggccatggcgacggctcgagtgcggatggggccgcgatgcgcccaggcgctctggcgcatgccgtggctgccggtgtttttgtcgttggcggcggcggcggcggcggcagcggcggagcagcaggtcccgctggtgctgtggtcgagtgaccgggacttgtgggctcctgcggccgacactcatgaaggccacatcaccagcgacttgcagctctctacctacttagatcccgccctggagctgggtcccaggaatgtgctgctgttcctgcaggacaagctgagcattgaggatttcacagcatatggcggtgtgtttggaaacaagcaggacagcgccttttctaacctagagaatgccctggacctggccccctcctcactggtgcttcctgccgtcgactggtatgcagtcagcactctgaccacttacctgcaggagaagctcggggccagccccttgcatgtggacctggccaccctgcgggagctgaagctcaatgccagcctccctgctctgctgctcattcgcctgccctacacagccagctctggtctgatggcacccagggaagtcctcacaggcaacgatgaggtcatcgggcaggtcctgagcacactcaagtccgaagatgtcccatacacagcggccctcacagcggtccgcccttccagggtggcccgtgatgtagccgtggtggccggagggctaggtcgccagctgctacaaaaacagccagtatcacctgtgatccatcctcctgtgagttacaatgacaccgctccccggatcctgttctgggcccaaaacttctctgtggcgtacaaggaccagtgggaggacctgactcccctcacctttggggtgcaggaactcaacctgactggctccttctggaatgactcctttgccaggctctcactgacctatgaacgactctttggtaccacagtgacattcaagttcattctggccaaccgcctctacccagtgtctgcccggcactggtttaccatggagcgcctcgaagtccacagcaatggctccgtcgcctacttcaatgcttcccaggtcacagggcccagcatctactccttccactgcgagtatgtcagcagcctgagcaagaagggtagtctcctcgtggcccgcacgcagccctctccctggcagatgatgcttcaggacttccagatccaggctttcaacgtaatgggggagcagttctcctacgccagcgactgtgccagcttcttctcccccggcatctggatggggctgctcacctccctgttcatgctcttcatcttcacctatggcctgcacatgatcctcagcctcaagaccatggatcgctttgatgaccacaagggccccactatttctttgacccagattgtgtgaccctgtgccagtgggggggttgagggtgggacggtgtccgtgttgttgctttcccaccctgcagcgcactggactgaagagcttccctcttcctactgcagcatgaactgcaagctcccctcagcccatcttgctccctcttcagcccgctgaggagctttcttgggctgcccccatctctcccaacaaggtgtacatattctgcgtagatgctagaccaaccagcttcccagggttcgtcgctgtgaggcgtaagggacatgaattctagggtctcctttctccttatttattcttgtggctacatcatccctggctgtggatagtgcttttgtgtagcaaatgctccctccttaaggttatagggctccctgagtttgggagtgtggaagtactacttaactgtctgtcctgcttggctgtcgttatcgttttctggtgatgttgtgctaacaataagaagtacacgggtttatttctgtggcctgagaaggaagggacctccacgacaggtgggctgggtgcgatcgccggctgtttggcatgttcccaccgggagtgccgggcaggagcatggggtgcttggttgtttccttcctaataaaataaacgcgggtcgccatgcaaaaaaaaaa

SEQ ID NO: 86 - DNA, 438 bp, Homo sapiens
  ref <308>: DATABASE ACCESSION NUMBER: NCBI / NM_003526
  ref <309>: DATABASE ENTRY DATE: 2011-11-19
  ref <313>: RELEVANT RESIDUES IN SEQ ID NO: (1)..(438)
atgcctgagccagccaagtctgctcccgccccgaagaagggctccaagaaggcagtgaccaaagcgcagaagaaagatggcaagaagcgcaagcgcagccgcaaggagagttactctgtgtacgtgtacaaggtgctgaaacaggtccatcccgacactggcatctcttccaaggccatgggcatcatgaattctttcgttaacgacatatttgagcgcatcgcgggcgaggcttcccgcctggcgcattacaacaagcgctcgaccatcacctccagggagatccagacggccgtgcgcctgctgcttcccggagagctggccaagcacgccgtgtcggagggcaccaaggccgtcaccaagtacaccagctccaagtaaacattccaagtaagcgtcttaacacctaaccccaaaggctcttttaagagccaccca

SEQ ID NO: 87 - DNA, 1145 bp, Homo sapiens
  ref <308>: DATABASE ACCESSION NUMBER: NCBI / NM_004718
  ref <309>: DATABASE ENTRY DATE: 2011-08-14
  ref <313>: RELEVANT RESIDUES IN SEQ ID NO: (1)..(1145)
cttctctggggcggtcgcgttggcagcggatgcgggaagccggactctgggcgtcatgtactacaagtttagtggcttcacgcagaagttggcaggagcatgggcttcggaggcctatagcccgcagggattaaagcctgtggtttccacagaagcaccacctatcatatttgccacaccaactaaactgacctccgattccacagtgtatgattatgctgggaaaaacaaagttccagagctacaaaagtttttccagaaagctgatggtgtgcccgtctacctgaaacgaggcctgcctgaccaaatgctttaccggaccaccatggcgctgactgtgggagggaccatctactgcctgatcgccctctacatggcttcgcagcccaaaaacaaatgagttaggctgcagaggactggtttgttttttggcataaaccctttgaagttcctttttcattgttaaattaaaatttttttttttacttggatggcttaacatttttgcaagaaaaataggaagatatgaagatgatgttttggtttgtttatgaaatgcatatggcttgtcagagctcattcgacagttaaagccattgtttaaagaaatggtgctttgctctgtgtttgtgctcctgatttccctggaggttctggatgaaggctgaacacaggcttgttaatgtcagtctgtgctgaggacctcagggacttgaggttgcatttttgagcatggggtgcaggagcctttctggatttggatgtggctatggaaagaacacagaagccaaggtcatgtgcatgaaatgaggagtttgagttagtcacctcggggattttttccattttgcagtaaaatgttaaattaatgtagcctgcctctatttgttgggcaggtaatttcaaagggttatttgcctcatctcctatctttagtgaaatcttatgtgtaattattccaccgtgggaacagagaatacctgtttagtgttgcactttagactggtgtctgttttgttaatgcagctgtgccacaaattctcctttatcttttaaaaatgttatagctttaaattttgatttattttgactgtggaataaatacatgaatgaaaaaaaaaaaaaaaaaaaaaaaaaaaaaaaaa

SEQ ID NO: 88 - DNA, 1252 bp, Homo sapiens
  ref <308>: DATABASE ACCESSION NUMBER: NCBI / NM_004436
  ref <309>: DATABASE ENTRY DATE: 2011-08-13
  ref <313>: RELEVANT RESIDUES IN SEQ ID NO: (1)..(1252)
tcgcaacgtcacgggcaagggccgccattttgactgagcaaccctagtgacaggagccgaagcagcagcgcaggttgtccccgtttcccctcccccttcccttctccggttgccttcccgggccccttacactccacagtcccggtcccgccatgtcccagaaacaagaagaagagaaccctgcggaggagaccggcgaggagaagcaggacacgcaggagaaagaaggtattctgcctgagagagctgaagaggcaaagctaaaggccaaatacccaagcctaggacaaaagcctggaggctccgacttcctcatgaagagactccagaaagggcaaaagtactttgactcaggagactacaacatggccaaagccaagatgaagaataagcagctgccaagtgcaggaccagacaagaacctggtgactggtgatcacatccccaccccacaggatctgccccagagaaagtcctcgctcgtcaccagcaagcttgcgggtggccaagttgaatgatgctgcccggggctctgccagatcctgagacgcttcccctccctgccccacccgggtcctgtgctggctcctgccccttcctgcttttgcagccaggggtcaggaggtggctcgggtgtgggctggagaggcagaagccctttcctgttggtgtcccagcacatggagccccttgggctgagcaccaagaccttgaaccttttttgttttaccttttttccaaataacagttgggagaaatatcaatgaaattctgggggtgggggtggggttgaaagggtggggtgggagatatggaggagtatgaattagggcttggagttggtaaaaacattcctgactatccttcttaaccacgtggctgatgtggggtaggtatgaggggaaggaagtggagtagcctaatgaaaaggggttctagttgagctctgtagataaatgccttgtttcagtgtggttggagacctggtgtcagataaaagaaactccatccgcacagacagatgcaaacagctcctctagttctgcagagctagttgagaactcaacattaatcattttaaaaagtactgtccttgaaatagatttgctgtgggaagaagggcagtgagtgtgggagaaaggagccgtgagcgtggggaaccccacagagcccaaaggactttttcagtattcgaaataaacaaaacaaaaacccatgaaaaaacccaacccagaaataaaaaaaaaaaaaa

SEQ ID NO: 89 - DNA, 1021 bp, Homo sapiens
  ref <308>: DATABASE ACCESSION NUMBER: NCBI / NM_001207
  ref <309>: DATABASE ENTRY DATE: 2011-11-21
  ref <313>: RELEVANT RESIDUES IN SEQ ID NO: (1)..(1021)
tgtgtcacttccggcctccctttagctgccatcttgcgtccccgcgtgtgtgcgcctaatctcaggtggtccacccgagaccccttgagcaccaaccctagtcccccgcgcggccccttattcgctccgacaagatgaaagaaacaatcatgaaccaggaaaaactcgccaaactgcaggcacaagtgcgcattggtgggaaaggaactgctcgcagaaagaagaaggtggttcatagaacagccacagcagatgacaaaaaacttcagttctccttaaagaagttaggggtaaacaatatctctggtattgaagaggtgaatatgtttacaaaccaaggaacagtgatccactttaacaaccctaaagttcaggcatctctggcagcgaacactttcaccattacaggccatgctgagacaaagcagctgacagaaatgctacccagcatcttaaaccagcttggtgcggatagtctgactagtttaaggagactggccgaagctctgcccaaacaatctgtggatggaaaagcaccacttgctactggagaggatgatgatgatgaagttccagatcttgtggagaattttgatgaggcttccaagaatgaggcaaactgaattgagtcaacttctgaagataaaacctgaagaagttactgggagctgctattttatattatgactgctttttaagaaatttttgtttatggatctgataaaatctagatctctaatatttttaagcccaagccccttggacactgcagctcttttcagtttttgcttatacacaattcattctttgcagctaattaagccgaagaagcctgggaatcaagtttgaaacaaagattaataaagttctttgcctagtatacagttttatttttttatttcattgacaccgatctgtacacagtaaaaaaaattgcttatagaaagctaatcatggcatgtaatatggctgataacctttggaatttgattaaagatttaaaatcacaaaaaaaaaaaaa

SEQ ID NO: 90 - DNA, 2088 bp, Homo sapiens
  ref <308>: DATABASE ACCESSION NUMBER: NCBI / NM_004907
  ref <309>: DATABASE ENTRY DATE: 2011-12-17
  ref <313>: RELEVANT RESIDUES IN SEQ ID NO: (1)..(2088)
ggtccgagttcggaatttcggttcaaggcccagttcctcggattgttcctgcgcaacttcagtttcccttccaggcacgggcaatgagtgtttggccgcgacgagttggaaagcccggatgcgtccttcggttgggcggggtgtctcagtgacgtcactgggggtataaaagggcctgggtggcgggcgcctgggcagagcgtcctagcagtgtcactgcgtgggttggtttgtgtagagaggcgtgagcgagcccgttgtccggagtgcacctgctgcctgttctgtccctcccgggagcccccgccgctgtcgccgtcgagtcgccatggaagtgcagaaagaggcacagcgcatcatgaccctgtcggtgtggaagatgtatcactcccgcatgcagcgcggtggcctgcggctgcaccggagtctgcagctgtcgctggtcatgcgcagcgcccgggagctctacctctcggccaaggtggaggccctcgagcccgaggtgtcgttgccggccgccctcccctctgaccctcgcctgcacccgccccgagaagccgagtccacggccgagacagcgacccccgacggtgagcacccgtttccggagccaatggacacgcaggaggcgccgacagccgaggagacctccgcctgctgtgccccgcgccccgccaaagtcagccgcaaacgacgcagcagcagcctgagcgacggcggggacgctggactggtcccgagcaagaaagcccgtctggaagaaaaggaagaagaggagggagcgtcatccgaagtcgccgatcgcctgcagccccctccggcgcaagcggagggcgcctttcccaacctggcccgcgtcctgcagaggcgcttctccggcctcctgaactgcagccccgcggcccctccgacggcgccgcccgcgtgcgaggcaaagcccgcttgccgcccggcggacagcatgctcaacgtgctcgtgcgggccgtggtggccttctgaggaccccgagcggcgctgccggagcccagagcgcgcgtcgaaccgtcggcccgagggcgcagacctgaggcgaggccacccccctccatcctgggggaagcgcccgcgaaaaccgtggagagaagccgccgcccgggctgctgagaggcccggagagggactctgtccccggggagccatcgccttcagtgtgcagggacggcaccgaggagtctgagccgggggcgcgggcgccttccgcagagacctgcgcccacaggtgctgtcttagtggactgggacgtgaacctttcgctctccttctggactgggagaagggaggcttgggtgttgtgttttttgttttgtttgtttgtttgtttttaaagatctcctcagggtcggacttcattttgtactgtgggctgtgctggccctttcaaggtttttcaagagttggttttgcgtttccaacctcggagaattccaggcactccccttccccctccgctgacatacttgtataagcggtcatcgttgcgtcatggggcaggcgtggggagcttcctgtcgccttgcgtgggtgtggggcctgggaggaggtcctggggcgtgcacccgccctgggcagtggggaggagagtggcctgagttacttcacccccgcgtgctgctggttaatgtcccgcgtctctgcaccttcgggtgggagcggggactgatctactttcacattctcaagtttttctcatctgcattagaggtgcccagtaggttcccaggttccagcgtgcccctccctcagacacacggacacaatcagccgagaagttcctggtctgaatcacgagaatgtggaggggtggggggtgtcagtggaaaggcataaggctgagctgagaccagttgctggtgaaactgggccaatctggggaggggaacatccttgccagggagtttctgagggtctgctttgtttacctttcgtgcggtggattctttttaactccgtctacctggcgttttgttagaaatgtcagataggaaaataaaaaccatttgagtaaaaaaaaaaaaaaaaaaaaaaaaaaaaaaaaaaaaaaaaaaaa

SEQ ID NO: 91 - DNA, 528 bp, Homo sapiens
  ref <308>: DATABASE ACCESSION NUMBER: NCBI / NM_004889
  ref <309>: DATABASE ENTRY DATE: 2011-11-28
  ref <313>: RELEVANT RESIDUES IN SEQ ID NO: (1)..(528)
gtgcattccctacccagcagccctcgcgcggtccggcacagcggacaccaggactccaaaatggcgtcagttggtgagtgtccggccccagtaccagtgaaggacaagaaacttctggaggtcaaactgggggagctgccaagctggatcttgatgcgggacttcagtcctagtggcattttcggagcgtttcaaagaggttactaccggtactacaacaagtacatcaatgtgaagaaggggagcatctcggggattaccatggtgctggcatgctacgtgctctttagctactccttttcctacaagcatctcaagcacgagcggctccgcaaataccactgaagaggacacactctgcacccccccaccccacgaccttggcccgagcccctccgtgaggaacacaatctcaatcgttgctgaatcctttcatatcctaataggaattaacctccaaataaaacatgactggtacgtgtgctgattgcctgcctgtctgccgtagccaaaaaaaaaaaaaaaaaa

SEQ ID NO: 92 - DNA, 1204 bp, Homo sapiens
  ref <308>: DATABASE ACCESSION NUMBER: NCBI / NM_003769
  ref <309>: DATABASE ENTRY DATE: 2011-11-13
  ref <313>: RELEVANT RESIDUES IN SEQ ID NO: (1)..(1204)
cgccgaccccttcgcttccgctccgcgttcccacaatgcagtgcggctgagcgcctcggagcccgcggggacgctgcggggggacccgtgctgaggcggcggcggcgacgtgggctgcggcgggcccgcggcgtcgggcggtgcggatgtcgggctgggcggacgagcgcggcggcgagggcgacgggcgcatctacgtggggaaccttccgaccgacgtgcgcgagaaggacttggaggacctgttctacaagtacggccgcatccgcgagatcgagctcaagaaccggcacggcctcgtgcccttcgccttcgtgcgcttcgaggacccccgagatgcagaggatgctatttatggaagaaatggttatgattatggccagtgtcggcttcgtgtggagttccccaggacttatggaggtcggggtgggtggccccgtggtgggaggaatgggcctcctacaagaagatctgatttccgagttcttgtttcaggacttcctccgtcaggcagctggcaggacctgaaggatcacatgcgagaagctggggatgtctgttatgctgatgtgcagaaggatggagtggggatggtcgagtatctcagaaaagaagacatggaatatgccctgcgtaaactggatgacaccaaattccgctctcatgagggtgaaacttcctacatccgagtttatcctgagagaagcaccagctatggctactcacggtctcggtctgggtcaaggggccgtgactctccataccaaagcaggggttccccacactacttctctcctttcaggccctactgagacaggtgatgggaattttttctttattttttaggttaactgagctgctttgtgctcagaatctacattccagattgaggatttagtgtcttaggaaatttttttaattttttttttttaaagaagaaaaaaaactacataatttctaccagggccatattagcagtgaaacattttaaactgcagaaattgtggttttggttcagaaacaagttgtatatttttcacccctgattatgggaaaaaaatcagttctgtctttgtgggttgctctactatggagatcaacagttactgtgactgagtcggcccattctgtttagaaatatattttaaatgtttagtaattgaaaaaaaaaaaaaaaaaaaaaaaaaaaaaaaaaaaaaaaaaa

SEQ ID NO: 93 - DNA, 1060 bp, Homo sapiens
  ref <308>: DATABASE ACCESSION NUMBER: NCBI / NM_003910
  ref <309>: DATABASE ENTRY DATE: 2011-12-04
  ref <313>: RELEVANT RESIDUES IN SEQ ID NO: (1)..(1060)
cagctacccaagctccaggagcttccggtatgtgttttccctctgttctcgattaccttggcaacggctgaggcgggagaccggtggtctgcaccgtcctggagggagatatgagtggctggactctcagccagccactgggatgtgttcgggctttggaccttgaggccggagagagctcccgagaggaggcggcgccacgttcgttcttctgaggggacggtagatttgggggttttcctctaggattctcgcgccgtttcctctgaagaaacaggaccagagagggaaggtgacctgaaagtcacagaataattttttagagctgaacaagaatccaagcctgcaactgcagagacgagagatctttctgctgtctatactcttggaaagcacatcctaagatctttgcagattatcctgtggaaggaaaatgcctaaagtcaaaagaagccggaaagcacccccagatggctgggagttgattgagccaacactggatgaattagatcaaaagatgagagaagctgaaacagaaccgcatgagggaaagaggaaagtggaatctctgtggcccatcttcaggatccaccaccagaaaacccgctacatcttcgacctcttttacaagcggaaagccatcagcagagaactctatgaatattgtattaaagaaggctatgcagacaaaaacctgattgcaaaatggaaaaagcaaggatatgagaacttgtgctgcctgcggtgcattcagacacgggacaccaacttcgggacgaactgcatctgccgcgtgcccaaaagcaagctggaagtgggccgcatcatcgagtgcacacactgtggctgtcgtggctgctctggctgaggctggcgcgctccaccctggactctggacttcgcaggttcctgcctgtcacgccacccccttcctgggagcagcgagcagtgccccaggcccgagttggagcacggtctctatggggaaggcttcgctgtctatcagctgtgatttgtaaaaataaaatctttaaatctctcgaaaaaaaaaaaaaaaaaa

SEQ ID NO: 94 - DNA, 674 bp, Homo sapiens
  ref <308>: DATABASE ACCESSION NUMBER: NCBI / NM_000100
  ref <309>: DATABASE ENTRY DATE: 2011-12-22
  ref <313>: RELEVANT RESIDUES IN SEQ ID NO: (1)..(674)
ccccttggttccgcccgcgcgtcacgtgaccccagcgcctacttgggctgaggagccgccgcgtcccctcgccgagtcccctcgccagattccctccgtcgccgccaagatgatgtgcggggcgccctccgccacgcagccggccaccgccgagacccagcacatcgccgaccaggtgaggtcccagcttgaagagaaagaaaacaagaagttccctgtgtttaaggccgtgtcattcaagagccaggtggtcgcggggacaaactacttcatcaaggtgcacgtcggcgacgaggacttcgtacacctgcgagtgttccaatctctccctcatgaaaacaagcccttgaccttatctaactaccagaccaacaaagccaagcatgatgagctgacctatttctgatcctgactttggacaaggcccttcagccagaagactgacaaagtcatcctccgtctaccagagcgtgcacttgtgatcctaaaataagcttcatctccgggctgtgccccttggggtggaaggggcaggattctgcagctgcttttgcatttctcttcctaaatttcattgtgttgatttctttccttcccaataggtgatcttaattactttcagaatattttcaaaatagatatatttttaaaatccttaaaaaaaaaaaaaaaaa

SEQ ID NO: 95 - DNA, 2161 bp, Homo sapiens
  ref <308>: DATABASE ACCESSION NUMBER: NCBI / NM_004785
  ref <309>: DATABASE ENTRY DATE: 2011-11-28
  ref <313>: RELEVANT RESIDUES IN SEQ ID NO: (1)..(2161)
ggagcccgagccggatcccgaggcgacgggagccgaacaggagccgccgctgaagccaccgccgggtgcccagcgccgccgccgcccccgagctcccccgcgcccctgcccgcgggcggccggtgggcagcgggcgccatggccgcgccggagccgctgcggccgcgcctgtgccgcttggtgcgcggagagcagggctacggcttccacctgcacggcgagaagggccgccgcgggcagttcatccggcgcgtggaacccggttcccccgccgaggccgccgcgctgcgcgctggggaccgcctggtcgaggtcaacggcgtcaacgtggagggcgagacgcaccaccaggtggtgcaaaggatcaaggctgtggaggggcagactcggctgctggtggtggaccaggagacagatgaggagctccgccggcggcagctgacctgtaccgaggagatggcccagcgagggctcccacccgcccacgacccctgggagccgaagccagactgggcacacaccggcagccacagctccgaagctggcaagaaggatgtcagtgggcccctgagggagctgcgccctcggctctgccacctgcgaaagggacctcagggctatgggttcaacctgcatagtgacaagtcccggcccggccagtacatccgctctgtggacccgggctcacctgccgcccgctctggcctccgcgcccaggaccggctcattgaggtgaacgggcagaatgtggagggactgcgccatgctgaggtggtggccagcatcaaggcacgggaggacgaggcccggctgctggtcgtggaccccgagacagatgaacacttcaagcggcttcgggtcacacccaccgaggagcacgtggaaggtcctctgccgtcacccgtcaccaatggaaccagccctgcccagctcaatggtggctctgcgtgctcgtcccgaagtgacctgcctggttccgacaaggacactgaggagagcggcctccacctgagccccacggcggccgaggccaaggagaaggctcgagccatgcgagtcaacaagcgcgcgccacagatggactggaacaggaagcgtgaaatcttcagcaacttctgagccccttcctgcctgtctcgggaccctgggacccctcccgcacggaccttgggcctcagcctgccccgagctcccccagcctcagtggactggagggtggtcctgccattgcccagaaatcagccccagccccggtgagcccccatcctgcccctgcccaccaggtactgggggcctgtggcagcaagatagggggagagagacccagagatgtgagagagagtcagagacagagacagagagagagagagagagacacagagagagacagagagagagcgagcgagcgcgcggcagccgcggggcgagggcctttgctgctctgccggggcctgctgactgaaaggaatttgtgtttttgctttttttccaaaaagatctccagctccacacatgtttccacttaataccagagacccccccccttcccctcccccttcccctcccccttgggacgcgctctaaataattgcaataaaacaaacctttctctgcaaaccatttcctccccgccccctcccctcagcagcggccgtcctgagtgggagtccctgggacttcccagtggccaagttggggcgcccagcctcttcgtggggaccttgggtaaggccagggaggcctgatgtggccgtaggagctgcccctgcccacctgccctggtgtgggggtccctaggccacaccctgctccccacccagctaccctgtgcgcctgtgccctgctgggggcctgggctctccgaggggcctgaggatggaggccccacgtccccgaggagggcggcctctggacaggcccctcattccgcgcggcagctcccaggcctggggaacgtaggtgtgtgagagcggcacccgggaaggacgcctggcctctggctcagccctgcttggcgggctcccccgtggacaccctgttgactttgcacttccctcccgggccccgcacccccgaaccgaccaccgatcgaccggcaccgctgttgcctcgtaagccatagcgcatgcgcgctctcaggataaacaggccctgcctggga

SEQ ID NO: 96 - DNA, 1969 bp, Homo sapiens
  ref <308>: DATABASE ACCESSION NUMBER: NCBI / NM_001120
  ref <309>: DATABASE ENTRY DATE: 2011-12-18
  ref <313>: RELEVANT RESIDUES IN SEQ ID NO: (1)..(1969)
gtgggaggcgcggccgtggggtggggtggggccaggtccgcgatgtgctcaccctggtctctcaggaccgttgcctttgcggctattttttgtgcaatccccgaagcctgcgtttcctgctgcctgggttcggggcgggggcatcgcgcaggccagaacggcccctgcgtccgtaggccagagcccctgccatcagcccctttagggtgctcgccggctgtcgggtgtgggggtatgccaggccccggaggactcggcttccccgctaacccgacccgccgcaccccacccaggccaggtcagagcagcccaccatgggatggggagggggtggaggctgcaccccgcgcccacccatccaccagcagccgccggagcgccgcgtggtcaccgttgtctttctcggcctcctgctggacctcctggccttcacgctgctgctgcccctgctgcccgggctgttggagagccacggccgtgcccacgaccccctctatggctcctggcagggcggggtggactggtttgccaccgccatcgggatgccagtggagaagaggtacaacagtgtcctgttcggaggtctcattggctcggcattctctgtcctgcagtttctgtgtgcgccactcactggggccacctctgactgcttggggaggcgcccggtgatgctgctgtgcctgatgggtgtggccacctcatatgcagtctgggccacctctcggagctttgcggccttcctggcctccaggctgattgggggcatcagcaaagggaacgtcagcctctccacggccatcgttgctgacctgggctcgcctctggcccgcagtcaaggcatggcggtcattggggtggccttctcactgggcttcaccctgggccctatgctcggagcctccctgcccctggaaatggcaccctggtttgccctgctcttcgcagcctccgacctgctgttcatcttctgcttcctgccagagacgctgcccctggagaaacgggcgccctctatcgccctggggttccgtgatgcggctgatctgctcagccccctggccctgctgcgcttctcggctgtcgctcgtggccaggacccaccctctggagacaggctcagcagcctgcgccgcctgggcctagtctacttcctctacctcttcctgttctcgggcctggagtacacgctgagcttcctcacacaccagcgcttccagttcagtagcctacagcaggggaagatgtttttcctcatcggcctcaccatggccaccatccagggtgcctatgcccggcggatccaccctggcggggaagttgctgccgtgaagcgggccctcctgctgctggtgcccgccttcctcctcatcggctggggacgttctctgcccgtgctgggcctggggctgctgctctactcctttgccgccgccgttgtggtgccctgcctgtcctccgtggtcgctggctatggctcaccagggcagaagggcacggtcatgggtacactgcgcagcctaggtgctctggccagggccgcggggcccctggtggccgcttcagtgtactggctggccggggcccaggcctgcttcaccacgtggtccgggctctttttgctccccttcttcctcctgcagaagctgagttacccggcacagacgctcaaggctgagtagctgagccactgtgcccaggctgtgggcaccaggcagagtgggagcctaggtcaggcccctgcccactgcctgacccccaccccccgccagtccagggagaccctgtgggtgggggccggcccctaagcaggaagctcaggcagctcctccagacttacttactccttcagtgactccgagctgcagcactccaaggctgtcagggcttctgtttgttttttaaactatgcaccaggtttctgatgatgaaataaagcacctgtttgttttataccaaaaaaaaaaaa

SEQ ID NO: 97 - DNA, 3048 bp, Homo sapiens
  ref <308>: DATABASE ACCESSION NUMBER: NCBI / NM_000182
  ref <309>: DATABASE ENTRY DATE: 2011-11-21
  ref <313>: RELEVANT RESIDUES IN SEQ ID NO: (1)..(3048)
cggccactcggcatctgggttttagtcaggcagtgctccaggcgcctggctgccaggctacgggagaaaagtcctccgctcggccgcacccgttagaggcgctctccactgctgtcctcttcagctcaagatggtggcctgccgggcgattggcatcctcagccgcttttctgccttcaggatcctccgctcccgaggttatatatgccgcaattttacagggtcttctgctttgctgaccagaacccatattaactatggagtcaaaggggatgtggcagttgttcgaattaactctcccaattcaaaggtaaatacactgagtaaagagctacattcagagttctcagaagttatgaatgaaatctgggctagtgatcaaatcagaagtgccgtccttatctcatcaaagccaggctgctttattgcaggtgctgatatcaacatgttagccgcttgcaagacccttcaagaagtaacacagctatcacaagaagcacagagaatagttgagaaacttgaaaagtccacaaagcctattgtggctgccatcaatggatcctgcctgggaggaggacttgaggttgccatttcatgccaatacagaatagcaacaaaagacagaaaaacagtattaggtacccctgaagttttgctgggggccttaccaggagcaggaggcacacaaaggctgcccaaaatggtgggtgtgcctgctgctttggacatgatgctgactggtagaagcattcgtgcagacagggcaaagaaaatgggactggttgaccaactggtggaacccctgggaccaggactaaaacctccagaggaacggacaatagaatacctagaagaagttgcaattacttttgccaaaggactagctgataagaagatctctccaaagagagacaagggattggtggaaaaattgacagcgtatgccatgactattccatttgtcaggcaacaggtttacaaaaaagtggaagaaaaagtgcgaaagcagactaaaggcctttatcctgcacctctgaaaataattgatgtggtaaagactggaattgagcaagggagtgatgccggttatctctgtgaatctcagaaatttggagagcttgtaatgaccaaagaatcaaaggccttgatgggactctaccatggtcaggtcctgtgcaagaagaataaatttggagctccacagaaggatgttaagcatctggctattcttggtgcagggctgatgggagcaggcatcgcccaagtctccgtggataaggggctaaagactatacttaaagatgccaccctcactgcgctagaccgaggacagcaacaagtgttcaaaggattgaatgacaaagtgaagaagaaagctctaacatcatttgaaagggattccatcttcagcaacttgactgggcagcttgattaccaaggttttgaaaaggccgacatggtgattgaagctgtgtttgaggaccttagtcttaagcacagagtgctaaaggaagtagaagcggtgattccagatcactgtatctttgccagtaacacatctgctctcccaatcagtgaaatcgctgctgtcagcaaaagacctgagaaggtgattggcatgcactacttctctcccgtggacaagatgcagctgctggagattatcacgaccgagaaaacttccaaagacaccagtgcttcagctgtagcagttggtctcaagcaggggaaggtcatcattgtggttaaggatggacctggcttctatactaccaggtgtcttgcgcccatgatgtctgaagtcatccgaatcctccaggaaggagttgacccgaagaagctggattccctgaccacaagctttggctttcctgtgggtgccgccacactggtggatgaagttggtgtggatgtagcgaaacatgtggcggaagatctgggcaaagtctttggggagcggtttggaggtggaaacccagaactgctgacacagatggtgtccaagggcttcctaggtcgtaaatctgggaagggcttttacatctatcaggagggtgtgaagaggaaggatttgaattctgacatggatagtattttagcgagtctgaagctgcctcctaagtctgaagtctcatcagacgaagacatccagttccgcctggtgacaagatttgtgaatgaggcagtcatgtgcctgcaagaggggatcttggccacacctgcagagggagacatcggagccgtctttgggcttggcttcccgccttgtctgggagggcctttccgctttgtggatctgtatggcgcccagaagatagtggaccggctcaagaaatatgaagctgcctatggaaaacagttcaccccatgccagctgctagctgaccatgctaacagccctaacaagaagttctaccagtgagcaggcctcatgcctcgctcagtcagtgcactaaccccagctgccggcagtgctggttctccaacagagtggtgtctagatttatcagagtaacgagaagacaaactccggcactgggtttgctccctgattaaagtgccttcagccaagaccatctctccctcctggtgaagtgtgacttcgaattagtttgcacttcctgttggaaggtagagcccactgctcattgtataagccccgaggcctagagtggcagccaagagccatctgaagccacctctctgcctgttcctcccaagaggccagggtggccaggggtggtgagggcagttctgcacccagccaaacacataacaataaaaaccaaactctgtgtcagcatctttgcccttctggtttaaacgcctccttcaaaaagcaatctggaagaaagccctgtgctttgggggagtaagaatgtgtgtgcagaattctaggcagcaccttagggagggactgggatgagagaaagtgggacctggtgggctcaaccacacacacctgtctgtgcagatgctttgcccaggcttctcaccacggtgtaccgggatattaaacctctttccccagcctggaaaaaaaaaaaa

SEQ ID NO: 98 - DNA, 1822 bp, Homo sapiens
  ref <308>: DATABASE ACCESSION NUMBER: NCBI / NM_003377
  ref <309>: DATABASE ENTRY DATE: 2011-12-04
  ref <313>: RELEVANT RESIDUES IN SEQ ID NO: (1)..(1822)
gccgtccccgccgccgctgcccgccgccaccggccgcccgcccgcccggctcctccggccgcctccgctgcgctgcgctgcgctgcctgcacccagggctcgggagggggccgcggaggagtcgccccccgcgcccggcccccgcccgccgcgcccgggcccgcgccatggggctctggctgtcgccgccccccgcgccgccgggctagggcgatgcgggcgcccccggcgggcggccccggcgggcaccatgagccctctgctccgccgcctgctgctcgccgcactcctgcagctggcccccgcccaggcccctgtctcccagcctgatgcccctggccaccagaggaaagtggtgtcatggatagatgtgtatactcgcgctacctgccagccccgggaggtggtggtgcccttgactgtggagctcatgggcaccgtggccaaacagctggtgcccagctgcgtgactgtgcagcgctgtggtggctgctgccctgacgatggcctggagtgtgtgcccactgggcagcaccaagtccggatgcagatcctcatgatccggtacccgagcagtcagctgggggagatgtccctggaagaacacagccagtgtgaatgcagacctaaaaaaaaggacagtgctgtgaagccagacagggctgccactccccaccaccgtccccagccccgttctgttccgggctgggactctgcccccggagcaccctccccagctgacatcacccatcccactccagccccaggcccctctgcccacgctgcacccagcaccaccagcgccctgacccccggacctgccgctgccgctgccgacgccgcagcttcctccgttgccaagggcggggcttagagctcaacccagacacctgcaggtgccggaagctgcgaaggtgacacatggcttttcagactcagcagggtgacttgcctcagaggctatatcccagtgggggaacaaagaggagcctggtaaaaaacagccaagcccccaagacctcagcccaggcagaagctgctctaggacctgggcctctcagagggctcttctgccatcccttgtctccctgaggccatcatcaaacaggacagagttggaagaggagactgggaggcagcaagaggggtcacataccagctcaggggagaatggagtactgtctcagtttctaaccactctgtgcaagtaagcatcttacaactggctcttcctcccctcactaagaagacccaaacctctgcataatgggatttgggctttggtacaagaactgtgacccccaaccctgataaaagagatggaaggagctgtccctgcctgtgtcactgtttgtcactgtccaggctggctggtttgggcatgaatgtctgcatcactaaatccagagcttgtcttgctccctcattgtgcagatggaggaaatgaggactaaggccccacagcagatcccaggcagggccagaattatgtattcatcactttcaagttattgccacgcatgggagtcagggatagcccagtcaatacagactgcctgccctcctgctcttcaccagggttcttttctagaaggagacagccttctgtggccagagagcttggggtaggacccagatctactgagtgaccttgcttgtcactacccctgcctctctgagcagcagtttccacatgtgcacatagagggaacagaagattgctgtggttggcgtcctcgggccccagagaagtttgagactatctttacgtaatagaaaagaacacttgttcttcctgccaggcaaaaaaaaaaaaaaaaaa

SEQ ID NO: 99 - DNA, 4539 bp, Homo sapiens
  ref <308>: DATABASE ACCESSION NUMBER: NCBI / NM_003576
  ref <309>: DATABASE ENTRY DATE: 2011-11-21
  ref <313>: RELEVANT RESIDUES IN SEQ ID NO: (1)..(4539)
ggagccaggctgcagtggtggggaggaccgggcaggtccagatgactttgaagggactccagaggaaggagagagtggaggaggagggctttgggttagggagagtgctttcgtttgttttaaatgggagaaactggagcatgttgccaagggcagagagccagcagagaggggtgaatggaagaaggagcgagaagggggttactgacgaagccttatcctggaggagagaaggatggactccagagcccagctttggggactggccttgaataaaaggagggccactctacctcatcctggagggagcacgaacctaaaggcagacccagaagagctttttacaaaactagagaaaattgggaagggctcctttggagaggtgttcaaaggcattgacaatcggactcagaaagtggttgccataaagatcattgatctggaagaagctgaagatgagatagaggacattcaacaagaaatcacagtgctgagtcagtgtgacagtccatatgtaaccaaatattatggatcctatctgaaggatacaaaattatggataataatggaatatcttggtggaggctccgcactagatctattagaacctggcccattagatgaaacccagatcgctactatattaagagaaatactgaaaggactcgattatctccattcggagaagaaaatccacagagacattaaagcggccaacgtcctgctgtctgagcatggcgaggtgaagctggcggactttggcgtggctggccagctgacagacacccagatcaaaaggaacaccttcgtgggcaccccattctggatggcacccgaggtcatcaaacagtcggcctatgactcgaaggcagacatctggtccctgggcataacagctattgaacttgcaagaggggaaccacctcattccgagctgcaccccatgaaagttttattcctcattccaaagaacaacccaccgacgttggaaggaaactacagtaaacccctcaaggagtttgtggaggcctgtttgaataaggagccgagctttagacccactgctaaggagttattgaagcacaagtttatactacgcaatgcaaagaaaacttcctacttgaccgagctcatcgacaggtacaagagatggaaggccgagcagagccatgacgactcgagctccgaggattccgacgcggaaacagatggccaagcctcggggggcagtgattctggggactggatcttcacaatccgagaaaaagatcccaagaatctcgagaatggagctcttcagccatcggacttggacagaaataagatgaaagacatcccaaagaggcctttctctcagtgtttatctacaattatttctcctctgtttgcagagttgaaggagaagagccaggcgtgcggagggaacttggggtccattgaagagctgcgaggggccatctacctagcggaggaggcgtgccctggcatctccgacaccatggtggcccagctcgtgcagcggctccagagatactctctaagtggtggaggaacttcatcccactgaaattcctttggcatttggggttttgtttttccttttttccttcttcatcctcctccttttttaaaagtcaacgagagccttcgctgactccaccgaagaggtgcgccactgggagccaccccagcgccaggcgcccgtccagggacacacacagtcttcactgtgctgcagccagatgaagtctctcagatgggtggggagggtcagctccttccagcgatcattttattttattttattacttttgtttttaattttaaccatagtgcacatattccaggaaagtgtctttaaaaacaaaaacaaaccctgaaatgtatatttgggattatgataaggcaactaaagacatgaaacctcaggtatcctgctttaagttgataactccctctgggagctggagaatcgctctggtggatgggtgtacagatttgtatataatgtcatttttacggaaaccctttcggcgtgcataaggaatcactgtgtacaaactggccaagtgcttctgtagataacgtcagtggagtaaatattcgacaggccataacttgagtctattgccttgcctttattacatgtacattttgaattctgtgaccagtgatttgggttttattttgtatttgcagggtttgtcattaataattaatgcccctctcttacagaacactcctatttgtacctcaacaaatgcaaattttccccgtttgccctacgccccttttggtacacctagaggttgatttcctttttcatcgatggtactatttcttagtgttttaaattggaacatatcttgcctcatgaagctttaaattataattttcagtttctccccatgaagcgctctcgtctgacatttgtttggaatcgtgccactgctggtctgcgccagatgtaccgtcctttccaatacgattttctgttgcaccttgtagtggattctgcatatcatctttcccacctaaaaatgtctgaatgcttacacaaataaattttataacacgcttattttgcatactccttgaaatgtgactcttcagaggacagggcacctgctgtgtatgtgtggccgtgcgtgtgtactcgtggctgtgtgtgtgtgatgagacactttggaagactccagggagaagtccccaggcctggagctgccgagtgcccaggtcagcgccctggactgcttgcgcacttgctcaccgagatgatgcagttggaggttgctgatctgtgcgattgctgtagcggttgccggggaccttaagagttattttgcttctctggaaggggcctatgcttgctaggcaggcagccagtgtgtctgtttttcttggtttgctgtgggaccttgcttggcgagggggaaaatctctgggtttctggagtgggagggttcgtgcagcagctgttgactggtacatgaagcattcttttatgtttgttgaagctgatgattgacatctcccgtgggtgtgccagttcttgtggagttaagacaggatttttggaagcaaggaagttagtgggtgagcttggggatgtagctcagctatctgctggtctagtggcctctaagctatagggaggggacagagccctgagctacagatgcttgagtgggttattgtgtcggtttgctagtgcagtctggtttttaagctctaaaattgaggtattttattagaagtggatttgggttgaactcttaatttgtataagggatatattttggttggggaaatagaactgagttgctaattcttattgtactcattactccatacaagaatgttatgttgaataataaaattggagaagatttcattttgtgtttccagggagtattctgtgtggggaactgtttccttacgtgaggccggcggcataagtcaaagatgagttttgtccttgcgaatcacacagattgagtctgtgttccccagggtgtgccgttacctgatttttaagtgagccagggcggacagcagcttttctgatttacagagttcttcagatttacaaatggacaatgacatcacagtttttagcactgaagccagtctcatgctagtaacagtgggtgagccgctcgagggactgggttctaatgaatactggtatgaacggggagtctctgcagtcgccagacaaatcatactcagccccttcccccgtagagcaacaagtggttcttttagagttgactggcagcatttcctgtcgggggaggtggggtttgatggagttagaaagctcgcctctgtgtacattctctcctgggctgttactttctgtagacgcacaaaatcagccccaatgtttttaagggcatcttagccaaggaagctggcttttgtgtcgccacttccaggcctgcattaagagagagcccaggcaccagggctaccactggaacctgcctcagcgtcaactgctgctggtctgtagccaggcccagcctttgagacgggtttactgtcaccagtagcctctcagtgccagccctgagctgctcctggctcagctgcccagagcctgcagcctggggaggtactcagcctctgggagacgagggccgtggactgggtggctggtagctcctgcgtttttgagctgtgtcctggctggctgctgccaatgaggtggacaccagtgtggtttggggtgcactggccacttcttgctgggttctgattttcttggaagtgcatctgccttccttatccaatagttttatccctgcattgctcttgtgaagtggctggtttggttctgtatgtagcattttgtacctttcctctggcaaaacactgtcagtttataaacattttttatatttccctcctttaaaaacagcttgtgtatttctgctataaaatgtgtcagcaaaggcagagtgacctaatagggcatgttcttaagcacagggactgtatcatgcaggggccaataaagctcaagaaaacgag

SEQ ID NO: 100 - DNA, 2596 bp, Homo sapiens
  ref <308>: DATABASE ACCESSION NUMBER: NCBI / NM_000918
  ref <309>: DATABASE ENTRY DATE: 2011-11-21
  ref <313>: RELEVANT RESIDUES IN SEQ ID NO: (1)..(2596)
gagcctcgaagtccgccggccaatcgaaggcgggccccagcggcgcgtgcgcgccgcggccagcgcgcgcgggcgggggggcaggcgcgccccggacccaggatttataaaggcgaggccgggaccggcgcgcgctctcgtcgcccccgctgtcccggcggcgccaaccgaagcgccccgcctgatccgtgtccgacatgctgcgccgcgctctgctgtgcctggccgtggccgccctggtgcgcgccgacgcccccgaggaggaggaccacgtcctggtgctgcggaaaagcaacttcgcggaggcgctggcggcccacaagtacctgctggtggagttctatgccccttggtgtggccactgcaaggctctggcccctgagtatgccaaagccgctgggaagctgaaggcagaaggttccgagatcaggttggccaaggtggacgccacggaggagtctgacctggcccagcagtacggcgtgcgcggctatcccaccatcaagttcttcaggaatggagacacggcttcccccaaggaatatacagctggcagagaggctgatgacatcgtgaactggctgaagaagcgcacgggcccggctgccaccaccctgcctgacggcgcagctgcagagtccttggtggagtccagcgaggtggctgtcatcggcttcttcaaggacgtggagtcggactctgccaagcagtttttgcaggcagcagaggccatcgatgacataccatttgggatcacttccaacagtgacgtgttctccaaataccagctcgacaaagatggggttgtcctctttaagaagtttgatgaaggccggaacaactttgaaggggaggtcaccaaggagaacctgctggactttatcaaacacaaccagctgccccttgtcatcgagttcaccgagcagacagccccgaagatttttggaggtgaaatcaagactcacatcctgctgttcttgcccaagagtgtgtctgactatgacggcaaactgagcaacttcaaaacagcagccgagagcttcaagggcaagatcctgttcatcttcatcgacagcgaccacaccgacaaccagcgcatcctcgagttctttggcctgaagaaggaagagtgcccggccgtgcgcctcatcaccctggaggaggagatgaccaagtacaagcccgaatcggaggagctgacggcagagaggatcacagagttctgccaccgcttcctggagggcaaaatcaagccccacctgatgagccaggagctgccggaggactgggacaagcagcctgtcaaggtgcttgttgggaagaactttgaagacgtggcttttgatgagaaaaaaaacgtctttgtggagttctatgccccatggtgtggtcactgcaaacagttggctcccatttgggataaactgggagagacgtacaaggaccatgagaacatcgtcatcgccaagatggactcgactgccaacgaggtggaggccgtcaaagtgcacagcttccccacactcaagttctttcctgccagtgccgacaggacggtcattgattacaacggggaacgcacgctggatggttttaagaaattcctggagagcggtggccaggatggggcaggggatgatgacgatctcgaggacctggaagaagcagaggagccagacatggaggaagacgatgatcagaaagctgtgaaagatgaactgtaatacgcaaagccagacccgggcgctgccgagacccctcgggggctgcacacccagcagcagcgcacgcctccgaagcctgcggcctcgcttgaaggagggcgtcgccggaaacccagggaacctctctgaagtgacacctcacccctacacaccgtccgttcacccccgtctcttccttctgcttttcggtttttggaaagggatccatctccaggcagcccaccctggtggggcttgtttcctgaaaccatgatgtactttttcatacatgagtctgtccagagtgcttgctaccgtgttcggagtctcgctgcctccctcccgcgggaggtttctcctctttttgaaaattccgtctgtgggatttttagacatttttcgacatcagggtatttgttccaccttggccaggcctcctcggagaagcttgtcccccgtgtgggagggacggagccggactggacatggtcactcagtaccgcctgcagtgtcgccatgactgatcatggctcttgcatttttgggtaaatggagacttccggatcctgtcagggtgtcccccatgcctggaagaggagctggtggctgccagccctggggcccggcacaggcctgggccttccccttccctcaagccagggctcctcctcctgtcgtgggctcattgtgaccactggcctctctacagcacggcctgtggcctgttcaaggcagaaccacgacccttgactcccgggtggggaggtggccaaggatgctggagctgaatcagacgctgacagttcttcaggcatttctatttcacaatcgaattgaacacattggccaaataaagttgaaattttaccacctgtaaaaaaaaaaaaaaaaaa

SEQ ID NO: 101 - DNA, 2128 bp, Homo sapiens
  ref <308>: DATABASE ACCESSION NUMBER: NCBI / NM_004584
  ref <309>: DATABASE ENTRY DATE: 2011-11-28
  ref <313>: RELEVANT RESIDUES IN SEQ ID NO: (1)..(2128)
gggccggcaggggcggtgcgcgggaagggaccccggacccggaggtcgcggagagctgggcagtgttggccgctggcggagcgctggggcagcatgaagtgcctggtcacgggcggcaacgtgaaggtgctcggcaaggccgtccactccctgtcccgcatcggggacgagctctacctggaacccttggaggacgggctctccctccggacggtgaactcctcccgctctgcctatgcctgctttctctttgccccgctcttcttccagcaataccaggcagccacccctggtcaggacctgctgcgctgtaagatcctgatgaagtctttcctgtctgtcttccgctcactggcgatgctggagaagacggtggaaaaatgctgcatctccctgaatggccggagcagccgcctggtggtccagctgcattgcaagttcggggtgcggaagactcacaacctgtccttccaggactgtgagtccctgcaggccgtcttcgacccagcctcgtgcccccacatgctccgcgccccagcacgggttctgggggaggctgttctgcccttctctcctgcactggctgaagtgacgctgggcattggccgtggccgcagggtcatcctgcgcagctaccacgaggaggaggcagacagcactgccaaagccatggtgactgagatgtgccttggagaggaggatttccagcagctgcaggcccaggaaggggtggccatcactttctgcctcaaggaattccgggggctcctgagctttgcagagtcagcaaacttgaatcttagcattcattttgatgctccaggcaggcccgccatcttcaccatcaaggactctttgctggacggccactttgtcttggccacactctcagacaccgactcgcactcccaggacctgggctccccagagcgtcaccagccagtgcctcagctccaggctcacagcacaccccacccggacgactttgccaatgacgacattgactcttacatgatcgccatggaaaccactataggcaatgagggctcgcgggtgctgccctccatttccctttcacctggcccccagccccccaagagccccggtccccactccgaggaggaagatgaggctgagcccagtacagtgcctgggactcccccacccaagaagttccgctcactgttcttcggctccatcctggcccctgtacgctccccccagggccccagccctgtgctggcggaagacagtgagggtgaaggctgaaccaagaacctgaagcctgtacccagaggccttggactagacgaagccccagccagtggcagaactgggtctctcagccctggggatcagaaaggtgggcttgctggagctgagctgtttcactgcctctcgcaggccccagctggctgtcactgtaaagctgtcccacagcggtcgggcctgggccgttatctccccacaacccccagccaatcaggactttccagacttggccctgaactactgacgttcctacctcttatttctcattgagcctcaggctatactccagctggccaaggctggaaacctgtctccctcaggctcaccttcctaaggaaaatgtcatagtaggtgctgctggcccctggtgatccagcttctctgccaatcatgacctgttccttcctgaagtcctgggcatgcatctgggacccccgtggagctgacaagttttccttgctttcctgatactctttggcgctgacttggaattctaagagccttggacccgagtgtgtggctagggttgccctggctggggcccggtgccgagactcccaagcggctctgtgcagaagagctgccaggcagtgtcttagatgtgagacggaggccatggcgagaatccagctttgacctttattcaagagaccagatgggttgccccaggatccggctgccagccctgaggccaagcacggctggagacccacgacctggcctgccgttgccctgagctgcagcctcggccccaggatcctgctcacagtcaccgcaggtgcaggcaggaagcagccctgggggactggacgctgctattgattcattaaaaaaagaaaagaaaaatacaaaaaaa

SEQ ID NO: 102 - DNA, 1782 bp, Homo sapiens
  ref <308>: DATABASE ACCESSION NUMBER: NCBI / NM_004952
  ref <309>: DATABASE ENTRY DATE: 2011-11-27
  ref <313>: RELEVANT RESIDUES IN SEQ ID NO: (1)..(1782)
ggagctgggaagcggagaagccgggagcgcggggctcagtcggggggcggcggcggcggcggctccggggatggcggcggctccgctgctgctgctgctgctgctcgtgcccgtgccgctgctgccgctgctggcccaagggcccggaggggcgctgggaaaccggcatgcggtgtactggaacagctccaaccagcacctgcggcgagagggctacaccgtgcaggtgaacgtgaacgactatctggatatttactgcccgcactacaacagctcgggggtgggccccggggcgggaccggggcccggaggcggggcagagcagtacgtgctgtacatggtgagccgcaacggctaccgcacctgcaacgccagccagggcttcaagcgctgggagtgcaaccggccgcacgccccgcacagccccatcaagttctcggagaagttccagcgctacagcgccttctctctgggctacgagttccacgccggccacgagtactactacatctccacgcccactcacaacctgcactggaagtgtctgaggatgaaggtgttcgtctgctgcgcctccacatcgcactccggggagaagccggtccccactctcccccagttcaccatgggccccaatgtgaagatcaacgtgctggaagactttgagggagagaaccctcaggtgcccaagcttgagaagagcatcagcgggaccagccccaaacgggaacacctgcccctggccgtgggcatcgccttcttcctcatgacgttcttggcctcctagctctgccccctcccctggggggggagagatggggcggggcttggaaggagcagggagcctttggcctctccaagggaagcctagtgggcctagacccctcctcccatggctagaagtggggcctgcaccatacatctgtgtccgccccctctaccccttccccccacgtagggcactgtagtggaccaagcacggggacagccatgggtcccgggcggccttgtggctctggtaatgtttggtaccaaacttgggggccaaaaagggcagtgctcaggactccctggcccctggtacctttccctgactcctggtgccctctccctttgtccccccagagagacatatgcccccagagagagcaaatcgaagcgtgggaggcacccccattgctctcctccaggggcagaacatggggaggggactagatgggcaaggggcagcactgcctgctgcttccttcccctgtttacagcaataagcacgtcctcctcccccactcccacttccaggattgtggtttggattgaaaccaagtttacaagtagacacccctgggggggcgggcagtggacaaggatggcaaggggtgggcattggggtgccaggcaggcatgtacagactctatatctctatatataatgtacagacagacagagtcccttccctctttaaccccctgacctttcttgacttccccttcagcttcagaccccttccccaccaggctaggccccccacacctgggggaccccctggcccctcttttgtcttctgtgaagacaggacctatgcaacgcacagacacttttggagaccgtaaaacaacaacgccccctcccttccagccctgagccgggaaccatctcccaggaccttgccctgctcaccctatgtggtcccacctatcctcctgggcctttttcaagtgctttggctgtgactttcatactctgctcttagtctaaaaaaaataaactggagataaaaataa

SEQ ID NO: 103 - DNA, 3372 bp, Homo sapiens
  ref <308>: DATABASE ACCESSION NUMBER: NCBI / NM_004308
  ref <309>: DATABASE ENTRY DATE: 2011-07-17
  ref <313>: RELEVANT RESIDUES IN SEQ ID NO: (1)..(3372)
gggagcagtgcccgagcgcggtttctcttaaggttctgcagggcaaggctgtctgggacaggcttggccatggatccgctctcagagctgcaggatgatctgaccttggatgacaccagcgaggctctgaaccagctgaagctggcctccatcgatgagaagaactggccctcggatgaaatgcctgacttccccaagtcagatgactccaaaagcagctccccggaacttgtcacacacctgaagtgggatgacccatactatgacatcgcccggcaccagatcgtggaggtggcaggagatgacaagtatgggcggaagatcattgtgtttagtgcctgtcgaatgccccccagccaccagctcgaccacagcaagctcctggggtacctgaagcacaccctggaccagtacgtggagagtgactacacacttctgtatctgcaccacggcctgaccagcgacaacaagccctccctcagctggctccgtgatgcctaccgggagtttgaccgcaagtacaagaagaacatcaaggccttgtacatcgtgcatccaaccatgttcatcaaaactctgctcatcctcttcaagcccctcatcagcttcaagttcgggcagaagatcttctatgtgaattacctgagcgagctgagcgagcacgtgaagctggagcagctggggatccctcgccaagtgctcaaatatgacgacttcctgaaatccacacagaagagccccgcgacagcccccaagcccatgcccccacggccccccctgcccaaccagcagtttggagtctcgctgcagcacctccaggagaagaatccagagcaggagcccattcccattgtactcagggagactgttgcctacttacaggcccacgctctcaccaccgagggcatcttccggaggtcggccaacacccaagtggtccgggaagtgcagcagaagtacaacatggggctgcctgtggatttcgaccagtacaatgagctgcacctgccagcagtcatcctcaagaccttcctccgggagcttcctgagcccctgctcacctttgacctctacccccatgtggtgggcttcctcaacattgatgaaagccagagggtgccagcgacactgcaggtcctccagacgctgcccgaggagaactaccaggtgcttcgtttcctgactgctttcctggtgcagatttctgcacacagtgaccagaacaagatgaccaacactaacctggctgttgttttcggccctaacctgctgtgggccaaggatgcggccatcaccctcaaggccattaatcccatcaacaccttcaccaagttccttctggatcaccaaggggagctgttcccaagcccggaccccagcgggctctgaacctggcccctgccccaccagccccttctctggtagcccgggtttggactcttcctcctggcatcaggggccatgaagccccctggagagagatgttggagccacccatcaggcatgctctcccccacctctgtccagcccgcctcacggccctggcggcctcgctgttaccagaagacgtttttctctgccttacacttctcactgcctctctggacaccgggcttttgctgggctctccagagctgggcttggctcttccagctggagaaggactgagccccagtaacccctttcctgctttttcctgcctctgtttccctagcaagtgtggatgaatcaaatgactgccggctgggctggtagcaggggccagtcctcccctcttgattgctgggaatgagcagctgagctctttggtgtggacaccgccccaagctgaggtgcctccctatctggtaggctgccctgctttgcagaagccccactgcatgaaggcctgagtgcaagcacccttgctcctgtactgcccccagcagcgcagtctggggtatttcccctgctgaggagtgacagggctggagactgtgtctgctttctgcctcctcttccacacatcctgggtcagcctttcccaagtgatactgcccctggggtgtcctaaccccttggttgtgcagggactggtagcttggatgacatggctcagagtcccagcatccacttgaaacctccctctccacctccccgcccccgagagctacagcgtgtgatggaatcagtgaccggccaggttagcctctcccctcttggcctcctttcccacacgggcagatcatcagccttcatgttcttgtggacctgtctgttacggagtcacactggcccctgccccagccagaggtgactcagtgcctcaggatcttatggctccttcctccagctgggggactcttaaaggggctggggtagagactaagagtgcccgtaggaggggcagagattgtgctgataggtcagtccagataggtgggttctagcaatttccccaggggattaaggggctctagggccacctttttttttttttttctgagatggagtctcgctctgtcaccaggctggagtgcagtggcgcgatctcggcacacctccgccttctgggttcaagcaattctcctgcctcagcctcctgagtagctgggactataggtgcatgccaccatgcccagctaatttttgtatttttagtagagacggggtttcaccatgttggccaggatggtctcgatctcctgacctcatgatccacccacctcggcctcccaaagtgctgggattccaggcgtgagccactgcgcccggccagccctgttgtctttcaaagaacctcggccccagtgatggctgatctcactcccactgtctcgtagaattacactccttcctggggatccctcttcctgcagccttgtccttggggagtacagggaagtacctgcagtgaccctgcccccatgaccttggccaggcaggatgattccagagcccgtactgtggggatcctcactgaccagcccagccccatccgcaagccaggctgggcctgggcataacttcgctgggctctcccaagaccatcagcagtgcatccagccccctggggcctgggctgctgctggttcttcatcagtcccttggtctctagcctcggccagggctgctctgctctccgccctcctttgtgtatcaagtgtcgctcacagccccattcactggggagcctttcggatctatttggtctttctcatgtcccccactggtctgtaccccagggagcgggtgcttgtactgtgtgaatccagtgttcacattcacacttaatgacttccttggcaccaatcatgtatttcaccgtttgcactttttgtatttcaataaaaatgttgatgcaaaaaaaaaaaaaaaaaaaaaaaaaaaaaa

SEQ ID NO: 104 - DNA, 3779 bp, Homo sapiens
  ref <308>: DATABASE ACCESSION NUMBER: NCBI / NM_003190
  ref <309>: DATABASE ENTRY DATE: 2011-11-27
  ref <313>: RELEVANT RESIDUES IN SEQ ID NO: (1)..(3779)
ggggacgcggcacagatagggggaagccggagtaatggttttcgggcaagtggatgttggagagcacacacaggagttggggggcgggggagggcctggggttggggagggctcgaactcggggctgctgggtagtccaggagggcgcggtaaggctggggtgtcctggtgagaactggagaggatctacccgggtccctgcctggccagtggggaaacaccggtcccccaggcaccttcacctaaccagagcggggatttccaccgcccctcatgccgccctttggaggaaagtgaaagtgaaaggaggaagaggaggcttcatggctgaggaggtcgcagcgccatgaagtccctgtctctgctcctcgctgtggctttgggcctggcgaccgccgtctcagcaggacccgcggtgatcgagtgttggttcgtggaggatgcgagcggaaagggcctggccaagagacccggtgcactgctgttgcgccagggaccgggggaaccgccgccccggccggacctcgaccctgagctctatctcagtgtacacgaccccgcgggcgccctccaggctgccttcaggcggtatccccggggcgcccccgcaccacactgcgagatgagccgcttcgtgcctctccccgcctctgcgaaatgggccagcggcctgacccccgcgcagaactgcccgcgggccctggatggggcttggctgatggtcagcatatccagcccagtcctcagcctctccagcctcttgcgaccacagccagagcctcagcaggagcctgttctcatcaccatggcaacagtggtactgactgtcctcacccacacccctgcccctcgagtgagactgggacaagatgctctgctggacttgagctttgcctacatgccccccacctccgaggccgcctcatctctggctccgggtccccctccctttgggctagagtggcgacgccagcacctgggtaagggacatctgctcctggctgcaactcctgggctgaatggccagatgccagcagcccaagaaggggccgtggcatttgctgcttgggatgatgatgagccatggggcccatggaccggaaatgggaccttctggctgcctacagttcaaccctttcaggagggcacctatctggccaccatacacctgccatacctgcaaggacaggtcaccctggagcttgctgtgtacaaaccccccaaagtgtccctgatgccagcaacccttgcacgggccgccccaggggaggcacccccggaattgctctgccttgtgtcccacttctacccttctgggggcctggaggtggagtgggaactccggggtggcccagggggccgctctcagaaggccgaggggcagaggtggctctcggccctgcgccaccattccgatggctctgtcagcctctctgggcacttgcagccgcccccagtcaccactgagcagcatggggcacgctatgcctgtcgaattcaccatcccagcctgcctgcctcggggcgcagcgctgaggtcaccctggaggtagcaggtctttcagggccctcccttgaggacagcgtaggccttttcctgtctgcctttcttctgcttgggctcttcaaggcactgggctgggctgctgtctacctgtccacctgcaaggattcaaagaagaaagcagagtgagggcactcactgccatcctgtggaagccaccatcatctctggcccaagcttctgtagtagctccctaaaataataccctatcatctgctcctaatccctccaatctctctccactgagtggctggaatgcttttttttttttctttcacttatataagggataatttttcttttttttttttttttgagacggagtctcactcttccgcccaggctgcagtgcagtggcatgatcttggcttactgcaacctccgcctcctgggttcaagcaattctgtggcttcagcctccggagtagctgggattacaggcacatgccaccacacccagtgaatttttgtatttttagtagagacggggtttcaccatgttggccaggctggtcttgaattcctgacctcaggtgatctgcccacctcagcctcccaaagtgctgggattacaggcgtgagccaccacaccaggcccgagaaatgcttttttaaaaaacacacatcttatggcattcaccttcttggagctctaggacagtggttctcaaaatttttttctctcaggacctcttaaaaatcatcaaggaccccaaaaagcttttgggtatgtgggttatagctatcaatatttatggtactagaacttaaaagtgagaaaaatttaaaacacgagaatacataggcacacattctattcatcgtgggaaccatggtgtcaatacatatcatgtagcttctgaaaaactccactgtacacttatagaatgaagaaggcaaaaaacttttttttttttttttttgagacggagtctcgctctgtcgcccaggctggagtgcagtggcgcgatctcggctcactgcaagctccgcctctcgggttcacgccattctcctgcctcagcctcccaagtagctcggactacaggcgtcctccaccatgcctggctaatattttgtattttttagtagagacggggtttcaccgtgttagccaggatggtctcgatctcctaacctggtgatccgcccgcctcggcctcccaaagtattgggattacccgcgtgagccaccgcgcccggctgcaaataatctttctttttttctgagacagagtctcgctctgttgcccaggctggagtgcagtggcacgatctcggctcacggcacgctccgcctcccgggttcacgccattctcctgcctcagcttcccgagtagctgggactacaggggcccgccaccacgcccggctaactttttgtgtttttagtagagacggggtttcaccgtgttagccaggatggtctcgatctcctgaccttgtgatctgcccgcctcggcctcccaaagtgctgggattacaggcgtgagccaccgcgcccggcggcgaaacacgatattgtactaacatcttaattttgttataaaatctcacaaaccccctgacatagtctcagagatctgtagggccgaggttacatttggagaacccgtactctagggccaaatccattcttcttgccctggctcacttgtcccccccaccgccccgcgctggagccactgcctagttcttcagccctagatggtgctcgccagacctcctctcaatgctcatcacacacagggctattcctttcctccaatgaaccaaacgcctcccgcccacctccaggtcccagtcctctgttccctttgcctggtccacccttgccctccctgggtcgcagacgaggtcggcctcgtcattccccgcagaccgccgcgcgtccctcttgtgcggttcaccacagttgtatttaagtgatcgtgtgagtcgtcgttaaatgcctgtctccccgcggatcatgggctcctcgaggacagggactggcctgtctgtccactgctgtaaccccgcgccggcatagggacctaaggcccactggagggcgctcatcaagtagctgctggatgttgacgaaggaagcggcggcgcagctcagggatctccgagtcaggacggtcggccagacccacggggtaacgggtctaatcgtgtaggaataaagctgtattccagtgcttccaaaaaaaaaaaaaaaaaaaaaaa

SEQ ID NO: 105 - DNA, 2174 bp, Homo sapiens
  ref <308>: DATABASE ACCESSION NUMBER: NCBI / NM_004640
  ref <309>: DATABASE ENTRY DATE: 2011-12-19
  ref <313>: RELEVANT RESIDUES IN SEQ ID NO: (1)..(2174)
ttccctgagacttccctcctccctcccctcagctagggcctgccggttcctagtgcgtgcccagcagtcctcaggtcaccttcactaccgggccaaggaccccgtgggaactcgcagccttcgccacactcgttcctcgcgcatccatggaggggtgcctacagagaagacctgcgtggcaaaaacctaaacgaagagatgaggggcatggagaggagtaggataagagaataaagataacagtgggggggagacgttagtttcctttatatcttttgttactggcggtagcagtgaagttagaaacggttttaaaacaaatttcagacaggcattttccaaaggcaagcctggagcgcacggatctgtataaccgcggaaggccctgtttccggtcccttgcgcctgcgctcttgcagccaagaaggcgggaggctggagtagagggaagcctgcaaccggaagtgaaggcagatttccctccttcgtcgctgttgctgccgccatacgcgctctccctgtttagctcttctgttagaaatagtatctttgttttcctttgctgttcctcaatcccctactcttcaccccttgttttcacctattttgcgagaacccatccagatcccccttcccttcttcccctgccggcccagttatggcagagaacgatgtggacaatgagctcttggactatgaagatgatgaggtggagacagcagctgggggagatggggctgaggcccctgccaagaaggatgtcaagggctcctatgtctccatccacagctctggctttcgtgacttcctgctcaagccagagttgctccgggccattgtcgactgtggctttgagcatccgtcagaagtccagcatgagtgcatccctcaggccattctgggaatggatgtcctgtgccaggccaagtcgggcatgggaaagacagcagtgtttgtcttggccacactgcaacagctggagccagttactgggcaggtgtctgtactggtgatgtgtcacactcgggagttggcttttcagatcagcaaggaatatgagcgcttctctaaatacatgcccaatgtcaaggttgctgttttttttggtggtctgtctatcaagaaggatgaagaggtgctgaagaagaactgcccgcatatcgtcgtggggactccaggccgtatcctagccctggctcgaaataagagcctcaacctcaaacacattaaacactttattttggatgaatgtgataagatgcttgaacagctcgacatgcgtcgggatgtccaggaaatttttcgcatgaccccccacgagaagcaggtcatgatgttcagtgctaccttgagcaaagagatccgtccagtctgccgcaagttcatgcaagatccaatggagatcttcgtggatgatgagacgaagttgacgctgcatgggttgcagcagtactacgtgaaactgaaggacaacgagaagaaccggaagctctttgaccttctggatgtccttgagttcaaccaggtggtgatctttgtgaagtctgtgcagcggtgcattgccttggcccagctactagtggagcagaacttcccagccattgccatccaccgtgggatgccccaggaggagaggctttctcggtatcagcagtttaaagattttcaacgacgaattcttgtggctaccaacctatttggccgaggcatggacatcgagcgggtgaacattgcttttaattatgacatgcctgaggattctgacacctacctgcatcgggtggccagagcaggccggtttggcaccaagggcttggctatcacatttgtgtccgatgagaatgatgccaagatcctcaatgatgtgcaggatcgctttgaggtcaatattagtgagctgcctgatgagatagacatctcctcctacattgaacagacacggtagaagactcgcccattttggaatgtgaccgtctgtccttcaggagaggacaccagggtgggggtgaaggagacactactgcccccacccctgacagcccccaccccatggcttccatcttttgcatcaccaccactcctgaacccccatttctgatttgtcagaatttttttttaacaaaactaaaaatgaaacacatgtgtctgtggtatctataaaaaaaaaaaaaaaa

SEQ ID NO: 106 - DNA, 2179 bp, Homo sapiens
  ref <308>: DATABASE ACCESSION NUMBER: NCBI / NM_001064
  ref <309>: DATABASE ENTRY DATE: 2011-12-04
  ref <313>: RELEVANT RESIDUES IN SEQ ID NO: (1)..(2179)
gatccgagccccgcctcctccccctgccccgcctctcccatccccgccccgccccgcccggcgacttaacgcgcccccgccccgcgcccggcctcggcagccgcctgtcgccgcgggagcagccgctatctctgtgtgtccgcgtgtgcgcccggtccccgcctgccgcaccatggagagctaccacaagcctgaccagcagaagctgcaggccttgaaggacacggccaaccgcctacgtatcagctccatccaggccaccactgcggcgggctctggccaccccacgtcatgctgcagcgccgcagagatcatggctgtcctctttttccacaccatgcgctacaagtcccaggacccccggaatccgcacaatgaccgctttgtgctctccaagggccatgcagctcccatcctctacgcggtctgggctgaagctggtttcctggccgaggcggagctgctgaacctgaggaagatcagctccgacttggacgggcacccggtcccgaaacaagctttcaccgacgtggccactggctccctgggccagggcctcggggccgcttgtgggatggcctacaccggcaaatacttcgacaaggccagctaccgagtctattgcttgctgggagacggggagctgtcagagggctctgtatgggaggccatggccttcgccagcatctataagctggacaaccttgtggccattctagacatcaatcgcctgggccagagtgacccggccccactgcagcaccagatggacatctaccagaagcggtgcgaggccttcggttggcatgccatcatcgtggatggacacagcgtggaggagctgtgcaaggcctttggccaggccaagcaccagccaacagccatcattgccaagaccttcaagggccgagggatcacgggggtagaagataaggagtcttggcatgggaagcccctccccaaaaacatggctgagcagatcatccaggagatctacagccagatccagagcaaaaagaagatcctggcaacccctccacaggaggacgcaccctcagtggacattgccaacatccgcatgcccagcctgcccagctacaaagttggggacaagatagccacccgcaaggcctacgggcaggcactggccaagctgggccatgccagtgaccgcatcatcgccctggatggggacaccaaaaattccaccttctcggagatcttcaaaaaggagcacccggaccgcttcatcgagtgctacattgctgagcagaacatggtgagcatcgcggtgggctgtgccacccgcaacaggacggtgcccttctgcagcacttttgcagccttcttcacgcgggcctttgaccagattcgcatggccgccatctccgagagcaacatcaacctctgcggctcccactgcggcgtttccatcggggaagacgggccctcccagatggccctagaagatctggctatgtttcggtcagtccccacatcaactgtcttttacccaagtgatggcgttgctacagagaaggcagtggaactagccgccaatacaaagggtatctgcttcatccggaccagccgcccagaaaatgccatcatctataacaacaatgaggacttccaggtcggacaagccaaggtggtcctgaagagcaaggatgaccaggtgaccgttatcggggctggggtgaccctgcacgaggccttggccgctgccgaactgctgaagaaagaaaagatcaacatccgcgtgctggaccccttcaccatcaagcccctggacagaaaactcattctcgacagcgctcgtgccaccaagggcaggatcctcaccgtggaggaccattattatgaaggtggcattggtgaggctgtgtccagtgcagtagtgggcgagcctggcatcactgtcacccacctggcagttaaccgggtaccaagaagtgggaagccggctgagctgctgaagatgtttggtatcgacagggatgccattgcacaagctgtgaggggcctcatcaccaaggcctagggcgggtatgaagtgtggggcgggggtctatacattcctgagattctgggaaaggtgctcaaagatgtactgagaggaggggtaaatatatgttttgagaaaaatgaattggccctgaaaaaaaaaaaaaaaaaa

SEQ ID NO: 107 - DNA, 1586 bp, Homo sapiens
  ref <308>: DATABASE ACCESSION NUMBER: NCBI / NM_002117
  ref <309>: DATABASE ENTRY DATE: 2011-12-25
  ref <313>: RELEVANT RESIDUES IN SEQ ID NO: (1)..(1586)
tccgcagtcccggttctaaagtccccagtcacccacccggactcacattctccccagaggccgagatgcgggtcatggcgccccgagccctcctcctgctgctctcgggaggcctggccctgaccgagacctgggcctgctcccactccatgaggtatttcgacaccgccgtgtcccggcccggccgcggagagccccgcttcatctcagtgggctacgtggacgacacgcagttcgtgcggttcgacagcgacgccgcgagtccgagaggggagccgcgggcgccgtgggtggagcaggaggggccggagtattgggaccgggagacacagaagtacaagcgccaggcacaggctgaccgagtgagcctgcggaacctgcgcggctactacaaccagagcgaggacgggtctcacaccctccagaggatgtctggctgcgacctggggcccgacgggcgcctcctccgcgggtatgaccagtccgcctacgacggcaaggattacatcgccctgaacgaggacctgcgctcctggaccgccgcggacaccgcggctcagatcacccagcgcaagttggaggcggcccgtgcggcggagcagctgagagcctacctggagggcacgtgcgtggagtggctccgcagatacctggagaacgggaaggagacgctgcagcgcgcagaacccccaaagacacacgtgacccaccaccccctctctgaccatgaggccaccctgaggtgctgggccctgggcttctaccctgcggagatcacactgacctggcagcgggatggggaggaccagacccaggacaccgagcttgtggagaccaggccagcaggagatggaaccttccagaagtgggcagctgtggtggtgccttctggacaagagcagagatacacgtgccatatgcagcacgaggggctgcaagagcccctcaccctgagctgggagccatcttcccagcccaccatccccatcatgggcatcgttgctggcctggctgtcctggttgtcctagctgtccttggagctgtggtcaccgctatgatgtgtaggaggaagagctcaggtggaaaaggagggagctgctctcaggctgcgtgcagcaacagtgcccagggctctgatgagtctctcatcacttgtaaagcctgagacagctgcctgtgtgggactgagatgcaggatttcttcacacctctcctttgtgacttcaagagcctctggcatctctttctgcaaaggcacctgaatgtgtctgcgttcctgttagcataatgtgaggaggtggagagacagcccacccccgtgtccaccgtgacccctgtccccacactgacctgtgttccctccccgatcatctttcctgttccagagaggtggggctggatgtctccatctctgtctcaaattcatggtgcactgagctgcaacttcttacttccctaatgaagttaagaacctgaatataaatttgtgttctcaaatatttgctatgaagcgttgatggattaattaaataagtcaattcctagaagttgagagagcaaataaagacctgagaaccttccagaa

SEQ ID NO: 108 - DNA, 2648 bp, Homo sapiens
  ref <308>: DATABASE ACCESSION NUMBER: NCBI / NM_004161
  ref <309>: DATABASE ENTRY DATE: 2011-11-27
  ref <313>: RELEVANT RESIDUES IN SEQ ID NO: (1)..(2648)
caggtacgcatgccccagaggcgcggcgcttggcgggaagctgagtcctggccttgcgtcgcactgtctgtcctcagctcgcgtagccgcgctcgcgactccctttcccggcatgccaggcggtgcggccgccctctgggccgtgtaaaggcccctcggtctaaggcttccctatttcctggttcgccggcggccattttgggtggaagcgatagctgagtggcggcggctgctgattgtgttctaggggacggagtaggggaagacgtttgctctcccggaacagcctatctcattcctttctttcgattacccgtggcgcggagagtcagggcggcggctgcggcagcaagggcggcggtggcggcggcggcagctgcagtgacatgtccagcatgaatcccgaatatgattatttattcaagttacttctgattggcgactcaggggttggaaagtcttgccttcttcttaggtttgcagatgatacatatacagaaagctacatcagcacaattggtgtggatttcaaaataagaactatagagttagacgggaaaacaatcaagcttcaaatatgggacacagcaggccaggaaagatttcgaacaatcacctccagttattacagaggagcccatggcatcatagttgtgtatgatgtgacagatcaggagtccttcaataatgttaaacagtggctgcaggaaatagatcgttatgccagtgaaaatgtcaacaaattgttggtagggaacaaatgtgatctgaccacaaagaaagtagtagactacacaacagcgaaggaatttgctgattcccttggaattccgtttttggaaaccagtgctaagaatgcaacgaatgtagaacagtctttcatgacgatggcagctgagattaaaaagcgaatgggtcccggagcaacagctggtggtgctgagaagtccaatgttaaaattcagagcactccagtcaagcagtcaggtggaggttgctgctaaaatttgcctccatccttttctcacagcaatgaatttgcaatctgaacccaagtgaaaaaacaaaattgcctgaattgtactgtatgtagctgcactacaacagattcttaccgtctccacaaaggtcagagattgtaaatggtcaatactgactttttttttattcccttgactcaagacagctaacttcattttcagaactgttttaaacctttgtgtgctggtttataaaataatgtgtgtaatccttgttgctttcctgataccagactgtttcccgtggttggttagaatatattttgttttgatgtttatattggcatgtttagatgtcaggtttagtcttctgaagatgaagttcagccattttgtatcaaacagcacaagcagtgtctgtcactttccatgcataaagtttagtgagatgttatatgtaagatctgatttgctagttcttccttgtagagttataaatggaaagattacactatctgattaatagtttcttcatactctgcatataatttgtggctgcagaatattgtaatttgttgcacactatgtaacaaaacaactgaagatatgtttaataaatattgtacttattggaagtaatatcaaactgtatggtgataagtattgttttgattcttatggttaaagggaaatagagccttgcattatattcaacacagccatttgtgtgtgcacaatgcaaactaaggtattctagacctatcttagagcagcatccagtatttgctttctagataatatgcccaataacatgacctagaggggcttctgtgctgtgtagggatttaaccaacttcagtggttcagggagctcaaactatatgtaaaacaagtttagaatgtatgctatctagcccgttatctctgatccttctctaaaaccatttgaaatagcttcattgatcaacatttcataaatgcatctgtggtagaggtagaaagcagcacctttcctaattggcaaatgatcagactaatgtgtgctaatgtttttcttccatgctttcagtcagattcaactattttatcctccacagttgcttaacttggtgttggaggagggtttaagcattaagataggaagcaggaaatttgattgctctaaatttagaaattatatccctaaaaattaaaacatgaatactgggtggtaatgataattgaggcaaatgtatttattttggtgacattttgcatatatgaagattttctgaaataggaccttcaagatcctagggggttttgtttggtttttaattgtgaggaataaaaaatcttctgcccacactggcattttaaggtgactgaggtcaaacgttgtttccttaggttgaaatagcagccaaaacattcttcacgcaggggcttgggatatggctgctggcaacacattttgttgtgggctccttaatttaatgataaaatttaagctaaacacaagccaaaaatgaataggtttttttaatttttatttttcactaaacaggcaattgaaatacatggtacaaaaataagtggtaagataattgtaaaatgaaatggacagaatattcaattttccatctatgaaaatttcacaataaaaatcatagtttactttgtaaaaaa

SEQ ID NO: 109 - DNA, 2715 bp, Homo sapiens
  ref <308>: DATABASE ACCESSION NUMBER: NCBI / NM_003339
  ref <309>: DATABASE ENTRY DATE: 2011-11-20
  ref <313>: RELEVANT RESIDUES IN SEQ ID NO: (1)..(2715)
gcttcgcagcgtcacgccctccggggccgtggcggcgacggcggtgcgtagcttactcacaggggcggcccgtatccctccgccgccggcgcggctcggccctccctcccctggcccgccaatccccgcgcctcccgacctgcccctcggtcgggcccaccccgtgctccgacggccccaccccggcggcgcagcccgcccgcccgcgcgtccctcggtccacctgcagcagggaggaagacaggcaatccctccggctgtccgaccaagagaggccggccgagcccgaggcttgggcttttgctttctggcggagggatctgcggcggtttaggaggcggcgctgatcctgggaggaagaggcagctacggcggcggcggcggtggcggctagggcggcggcgaataaaggggccgccgccgggtgatgcggtgaccgctgcggcaggcccaggagctgagtgggccccggccctcagcccgtcccgccggacccgctttcctcaactctccatcttctcctgccgaccgagatcgccgaggcggcctcaggctccctagccccttccccgtcccttccccgcccccgtccccgccccgggggccgccgccacccgcctcccaccatggctctgaagagaatccacaaggaattgaatgatctggcacgggaccctccagcacagtgttcagcaggtcctgttggagatgatatgttccattggcaagctacaataatggggccaaatgacagtccctatcagggtggagtatttttcttgacaattcatttcccaacagattaccccttcaaaccacctaaggttgcatttacaacaagaatttatcatccaaatattaacagtaatggcagcatttgtcttgatattctacgatcacagtggtctccagcactaactatttcaaaagtactcttgtccatctgttctctgttgtgtgatcccaatccagatgatcctttagtgcctgagattgctcggatctacaaaacagatagagaaaagtacaacagaatagctcgggaatggactcagaagtatgcgatgtaattaaagaaattattggataacctctacaaataaagataggggaactctgaaagagaaagtccttttgatttccatttgactgctttctatgagcccacgcctcatcttcccctgtgcacatgtttacctgatacagcagtgctgcgtgttgtacatacttggaacaacaaactagaaatactgtacttctgtaccaacattgcctcctagcagagaagtgtgtgtgtgacaagccagttctacaggcattacctaggtgtgagactaaaagcttttcttattgacttaaatttggataacagcaaggtgtgaggggggtggtgggtatggtgtgtgcttggatgggaaagaaaaggctccactcacctataggagattatttttaagtggaatccatttaaactcaaaacagttatgaaaagcaaggtgaagaacatgaagctgtgtctgtattcattttattccgaaggagctacgtcttaggtgaaagttatgaccaaccagattaaactctacccacatcctgcattttaaggtctaagtttaactggtcaacatttaaatggattggagctattagtacatcaagtgtgatgggctttgttcccaactcttttacatctccctaccccttcaacctttggcctttcagcccttctttctctcttccatattctttggtttgtatgtggtttctcagttaatacatagctaatagctcttatttttcttatgtttttaaccgcttaggtctatttggatgtaagggtgaaaattcatttgatggaaatacttgtgtatatttaaagacccaattgctcctctggagcttgtactttcaagaatgattaatctgtgtaataaactggttactacagtcattacatataattttgtgtgaataggctttttcatttttaagaagtttgtctagctgagattagtggtggattttctcccacttctgaaatgttcatttatactggttgcattttaagatcatgaaacaattccagttacattgtaaaaaggatatcttacgagtaattttattgaacaagttagaggcataagcttaagagcatttccatgaaacaacacatgcagcattccaggaacttgattgttaaattcaataagaaatttgctttattaatgaaactaagctgcatttcatcaaaaccttgtgacattcccttggtacataggacataaaacacagaggcattgctatttggtaagttaagcttctgtgattgtaattataaaagagcaacattgaccaaacctgggaaacaagagcacagtcttgtttggagagtctacataattactttgcactaacatttgcaggatgttcacacaattttaaattgtactgtatgtggctttttgaagtcttcccttgaccctagtaaaatatagcttgaaacttgtaaacaactgtgtttgccagaaacatcattcatgtgaactaggcaagttaccttttttccccccttcttttcctaattgtaaactaggccaacctgaaagccatggctgatgctctagccatcaggttctttcaaatgcatctttacactcttgcacaaaagttaaggaataaatgtccactgcttttggttttaaaaaaaaaaaaaaa

SEQ ID NO: 110 - DNA, 1540 bp, Homo sapiens
  ref <308>: DATABASE ACCESSION NUMBER: NCBI / NM_003969
  ref <309>: DATABASE ENTRY DATE: 2011-12-24
  ref <313>: RELEVANT RESIDUES IN SEQ ID NO: (1)..(1540)
aggcgcacaacgcaggccgggcgggaagagccaaagcgggcaggcggcggaaatatccgaagcggcggggcgcccgaggccgttgccgacctccgcgctaaagccgctgctgccgcggaagacgatcctccagtacccgcccgccgtcaccgcagctgccgtgtcctcctcccacccctagccgcaccccctcgcggagggatcagctgagcggccaaacggcacggtcgggggagccccgagtccgcagctgcagcggggcctgagaccagagttggcgagggcaaggaaggagcggccccgggcagtgggggcggggccgggcgggcccgagaacagccgaatttggccgagcgctgccgagcgagtccgaggcgctgggccaggccggagccggactacgggagccgaggcgggccgcgcggtgggcgcggagaggagcggagcggcgcggcaggccgggcgggtggcggcagcagcggaggaggccgcagctgcgggtccgaggagcggaggcgacgcgggcggcggcggggggccgggtggccggggtcccgggccccgcggcggcggcagcggcggcggcggcggcaggatgatcaagctgttctcgctgaagcagcagaagaaggaggaggagtcggcgggcggcaccaagggcagcagcaagaaggcgtcggcggcgcagctgcggatccagaaggacataaacgagctgaacctgcccaagacgtgtgatatcagcttctcagatccagacgacctcctcaacttcaagctggtcatctgtcctgatgagggcttctacaagagtgggaagtttgtgttcagttttaaggtgggccagggttacccgcatgatccccccaaggtgaagtgtgagacaatggtctatcaccccaacattgacctcgagggcaacgtctgcctcaacatcctcagagaggactggaagccagtccttacgataaactccataatttatggcctgcagtatctcttcttggagcccaaccccgaggacccactgaacaaggaggccgcagaggtcctgcagaacaaccggcggctgtttgagcagaacgtgcagcgctccatgcggggtggctacatcggctccacctactttgagcgctgcctgaaatagggttggcgcatacccacccccgccacggccacaagccctggcatcccctgcaaatatttattgggggccatgggtaggggtttggggggcggccggtgggggaatcccctgccttggccttgcctccccttcctgccacgtgcccctagttatttttttttttttaacaccatgtgattaaggtcggcgctgcctcccccgacccactcagcgatgggaaatgaattggcttgtctagcccccctgctgggtgcttgttcagcccccactctgggctgtggagtgggtgggcaacgggcctgggtagctgggcccaggcaacccacccctccacctctggaggtcccaccaggctattaaaggggaatgttactgcaaaaaaaaaaaaaaaaa

SEQ ID NO: 111 - DNA, 1926 bp, Homo sapiens
  ref <308>: DATABASE ACCESSION NUMBER: NCBI / NM_000516
  ref <309>: DATABASE ENTRY DATE: 2011-12-18
  ref <313>: RELEVANT RESIDUES IN SEQ ID NO: (1)..(1926)
ggcgggggcccggccgaggcaataagagcggcggcggcggcagcggcggcagcagctcccgcagctcctgctctggtccgcctcggcccggcggcggccatcagccccctcggcctcggctcgaggggcggggagctgcgcgcgcccctcggtccgaccgacaccctccccttcccgcccgtccgcgcgccccgcggcccgcggcccgcagtccgccccgcgcgctccttgccgaggagccgagcccgcgcccggcccgcccgcccggcgctgccccggccctcccggcccgcgtgaggccgcccgcgcccgccgccgccgcagcccggccgcgccccgccgccgccgccgccgccatgggctgcctcgggaacagtaagaccgaggaccagcgcaacgaggagaaggcgcagcgtgaggccaacaaaaagatcgagaagcagctgcagaaggacaagcaggtctaccgggccacgcaccgcctgctgctgctgggtgctggagaatctggtaaaagcaccattgtgaagcagatgaggatcctgcatgttaatgggtttaatggagagggcggcgaagaggacccgcaggctgcaaggagcaacagcgatggtgagaaggcaaccaaagtgcaggacatcaaaaacaacctgaaagaggcgattgaaaccattgtggccgccatgagcaacctggtgccccccgtggagctggccaaccccgagaaccagttcagagtggactacatcctgagtgtgatgaacgtgcctgactttgacttccctcccgaattctatgagcatgccaaggctctgtgggaggatgaaggagtgcgtgcctgctacgaacgctccaacgagtaccagctgattgactgtgcccagtacttcctggacaagatcgacgtgatcaagcaggctgactatgtgccgagcgatcaggacctgcttcgctgccgtgtcctgacttctggaatctttgagaccaagttccaggtggacaaagtcaacttccacatgtttgacgtgggtggccagcgcgatgaacgccgcaagtggatccagtgcttcaacgatgtgactgccatcatcttcgtggtggccagcagcagctacaacatggtcatccgggaggacaaccagaccaaccgcctgcaggaggctctgaacctcttcaagagcatctggaacaacagatggctgcgcaccatctctgtgatcctgttcctcaacaagcaagatctgctcgctgagaaagtccttgctgggaaatcgaagattgaggactactttccagaatttgctcgctacactactcctgaggatgctactcccgagcccggagaggacccacgcgtgacccgggccaagtacttcattcgagatgagtttctgaggatcagcactgccagtggagatgggcgtcactactgctaccctcatttcacctgcgctgtggacactgagaacatccgccgtgtgttcaacgactgccgtgacatcattcagcgcatgcaccttcgtcagtacgagctgctctaagaagggaacccccaaatttaattaaagccttaagcacaattaattaaaagtgaaacgtaattgtacaagcagttaatcacccaccatagggcatgattaacaaagcaacctttcccttcccccgagtgattttgcgaaacccccttttcccttcagcttgcttagatgttccaaatttagaaagcttaaggcggcctacagaaaaaggaaaaaaggccacaaaagttccctctcactttcagtaaaaataaataaaacagcagcagcaaacaaataaaatgaaataaaagaaacaaatgaaataaatattgtgttgtgcagcattaaaaaaaatcaaaataaaaattaaatgtgagcaaagaatgaaaaaaaaaaaaaaaaaaaa

SEQ ID NO: 112 - DNA, 3340 bp, Homo sapiens
  ref <308>: DATABASE ACCESSION NUMBER: NCBI / NM_002819
  ref <309>: DATABASE ENTRY DATE: 2011-11-28
  ref <313>: RELEVANT RESIDUES IN SEQ ID NO: (1)..(3340)
tgcgggcgtctccgccattttgtgagtctataactcggagccgttgggtcggttcctgctattccggcgcctccactccgtcccccgcgggtctgctctgtgtgccatggacggcattgtcccagatatagccgttggtacaaagcggggatctgacgagcttttctctacttgtgtcactaacggaccgtttatcatgagcagcaactcggcttctgcagcaaacggaaatgacagcaagaagttcaaaggtgacagccgaagtgcaggcgtcccctctagagtgatccacatccggaagctccccatcgacgtcacggagggggaagtcatctccctggggctgccctttgggaaggtcaccaacctcctgatgctgaaggggaaaaaccaggccttcatcgagatgaacacggaggaggctgccaacaccatggtgaactactacacctcggtgacccctgtgctgcgcggccagcccatctacatccagttctccaaccacaaggagctgaagaccgacagctctcccaaccaggcgcgggcccaggcggccctgcaggcggtgaactcggtccagtcggggaacctggccttggctgcctcggcggcggccgtggacgcagggatggcgatggccgggcagagccccgtgctcaggatcatcgtggagaacctcttctaccctgtgaccctggatgtgctgcaccagattttctccaagttcggcacagtgttgaagatcatcaccttcaccaagaacaaccagttccaggccctgctgcagtatgcggaccccgtgagcgcccagcacgccaagctgtcgctggacgggcagaacatctacaacgcctgctgcacgctgcgcatcgacttttccaagctcaccagcctcaacgtcaagtacaacaatgacaagagccgtgactacacacgcccagacctgccttccggggacagccagccctcgctggaccagaccatggccgcggccttcggtgcacctggtataatctcagcctctccgtatgcaggagctggtttccctcccacctttgccattcctcaagctgcaggcctttccgttccgaacgtccacggcgccctggcccccctggccatcccctcggcggcggcggcagctgcggcggcaggtcggatcgccatcccgggcctggcgggggcaggaaattctgtattgctggtcagcaacctcaacccagagagagtcacaccccaaagcctctttattcttttcggcgtctacggtgacgtgcagcgcgtgaagatcctgttcaataagaaggagaacgccctagtgcagatggcggacggcaaccaggcccagctggccatgagccacctgaacgggcacaagctgcacgggaagcccatccgcatcacgctctcgaagcaccagaacgtgcagctgccccgcgagggccaggaggaccagggcctgaccaaggactacggcaactcacccctgcaccgcttcaagaagccgggctccaagaacttccagaacatattcccgccctcggccacgctgcacctctccaacatcccgccctcagtctccgaggaggatctcaaggtcctgttttccagcaatgggggcgtcgtcaaaggattcaagttcttccagaaggaccgcaagatggcactgatccagatgggctccgtggaggaggcggtccaggccctcattgacctgcacaaccacgacctcggggagaaccaccacctgcgggtctccttctccaagtccaccatctaggggcacaggcccccacggccgggccccctggcgacaacttccatcattccagagaaaagccactttaaaaacagctgaagtgaccttagcagaccagagattttatttttttaaagagaaatcagtttacctgtttttaaaaaaattaaatctagttcaccttgctcaccctgcggtgacagggacagctcaggctcttggtgactgtggcagcgggagttcccggccctccacacccggggccagaccctcggggccatgccttggtggggcctgtgtcgggcgtggggcctgcaggtgggcgccccgaccacgacttggcttccttgtgccttaaaaaacctgccttcctgcagccacacacccacccggggtgtcctggggacccaaggggtgggggggtcacaccagagagaggcagggggcctggccggctcctgcaggatcatgcagctggggcgcggcggccgcggctgcgacaccccaaccccagccctctaatcaagtcacgtgattctcccttcaccccgcccccagggccttcccttctgcccccaggcgggctccccgctgctccagctgcggagctggtcgacataatctctgtattatatactttgcagttgcagacgtctgtgcctagcaatatttccagttgaccaaatattctaatcttttttcatttatatgcaaaagaaatagttttaagtaactttttatagcaagatgatacaatggtatgagtgtaatctaaacttccttgtggtattaccttgtatgctgttacttttattttattccttgtaattaagtcacaggcaggacccagtttccagagagcaggcggggccgcccagtgggtcaggcacagggagccccggtcctatcttagagcccctgagcttcagggaaggggcgggcgtgtcgccgcctctggcatcgcctccggttgccttacaccacgccttcacctgcagtcgcctagaaaacttgctctcaaacttcagggttttttcttccttcaaattttggaccaaagtctcatttctgtgttttgcctgcctctgatgctgggacccggaaggcgggcgctcctcctgtcttctctgtgctctttctaccgcccccgcgtcctgtcccgggggctctcctaggatcccctttccgtaaaagcgtgtaacaagggtgtaaatatttataattttttatacctgttgtgagacccgaggggcggcggcgcggttttttatggtgacacaaatgtatattttgctaacagcaattccaggctcagtattgtgaccgcggagccacaggggaccccacgcacattccgttgccttacccgatggcttgtgacgcggagagaaccgattaaaaccgtttgagaaactcctcccttgtctagccctgtgttcgctgtggacgctgtagaggcaggttggccagtctgtacctggacttcgaataaatcttctgtatcctcgctccgttccgccttaaaaaaaaaaaaaaaaaaaaaaaaaaaaaaaaaaaaaaaaaaaaaaaaaaaaaaaaaaa

SEQ ID NO: 113 - DNA, 549 bp, Homo sapiens
  ref <308>: DATABASE ACCESSION NUMBER: NCBI / NM_001001
  ref <309>: DATABASE ENTRY DATE: 2011-11-19
  ref <313>: RELEVANT RESIDUES IN SEQ ID NO: (1)..(549)
cctttcctgttaggcgagagctgcgaaaggcgagagctgcgaagggccaggtgtcgggcgctgtttctcgttttcatcatatagacaaaacagccctgctgcaaagatggtcaacgtacctaaaacccgaagaaccttctgtaagaagtgtggcaagcatcagcctcacaaagtgacacagtataagaagggcaaggattctttgtatgcccagggaaggaggcgctatgatcggaagcagagtggctatggtgggcagacaaagccaattttccggaagaaggctaagaccacaaagaagattgtgctaaggctggaatgtgttgagcctaactgcagatccaagaggatgctggccattaagagatgcaagcattttgaactgggaggagataagaagagaaagggccaagtgatccagttctaaactttgggatatttttcttcaattttgaagagaaaatggtgaagccatagaaaagttacccgagggaaaataaatacagtgatattcttacgcaaaaaaaaaaaaaaaaaaaaaaaaaaaaa

SEQ ID NO: 114 - DNA, 1668 bp, Homo sapiens
  ref <308>: DATABASE ACCESSION NUMBER: NCBI / NM_004649
  ref <309>: DATABASE ENTRY DATE: 2011-12-24
  ref <313>: RELEVANT RESIDUES IN SEQ ID NO: (1)..(1668)
agtcccgacgagcaacgcgtttgtagaggggtgggtgcgcacgctctgtccctgcgtgaccttccgaccccgctgtcctcaccgcaatggcggctgtgagggccctggtggcctcgaggctcgctgcggcatctgcattcacgtccctgtcccccggcggtcggacgccttcccagcgcgcagcccttcacctctccgtgccgcgccccgcggccagggtcgcgctggtgctgtctggatgcggagtctacgatgggaccgagatccacgaggcctcggcgatcctggtgcacctgagccgtggaggggctgaagtccagatctttgctcctgacgtccctcagatgcacgtgattgaccacaccaaggggcagccgtccgaaggcgagagcaggaatgttttgaccgagtctgcgaggatcgcccgtggcaaaatcacagacctggccaacctcagtgcagccaaccatgatgctgccatctttccaggaggctttggagcggctaaaaacctgagcacgtttgccgtggacgggaaagattgcaaggtgaataaagaagtggagcgtgtcctgaaggagttccaccaggccgggaagcccatcggcttgtgctgcattgcacctgtcctcgcggccaaggtgctcagaggcgtcgaggtgactgtgggccacgagcaggaggaaggtggcaagtggccttatgccgggaccgcagaggccatcaaggccctgggtgccaagcactgcgtgaaggaagtggtcgaagctcacgtggaccagaaaaacaaggtggtcacgaccccagccttcatgtgcgagacggcactccactacatccatgatgggatcggagccatggtgaggaaggtgctggaactcactggaaagtgacgcgcatggacggggcccagctaggcgccaggacttggcctcaccctctggctgaggagctgtcggctgctttccatccagctgggagtctggcaggcccttttttttttttctttgccgaaacctgcaggcgttctctctctaaggaggatgtgctgcagtgcatgggggatgtttcttcctgggtgtggctgggctgctctcacatacagaggccgaggggccaattcgttctctgccacagggacttgcctcactgtgtcccaaaaacaaatcgcagccagcttttccagaaatagaaaattctgccgtctgaggttttatacttcaggttagttagtttttggaaggaagaacatttttaggtttgcaagcctcctgatcaggaaaccagaaataccacatttatggaccatgaaaggttggttcttgactctgaagggacttttgagttaatcagcgtaaggggatttctaaagcaggcaatccctgtagccgcagagaataaacgccttcccaaaatggcaacttcccacagccacatttcagacctgctgagactgctgagtgaggaatggcagtgaggtttcttcaattagtctcagttctcttaattttcaggaagaaagggaaattgcagcccctcagcccccaggattgacctctggggagtgatggtagcgttggtgccaggccgtgggttcaggtgtggcagaagcttgcagatgcgtccgaagggaaataaagtgtgttggcgttagactttgtgctgcaa

SEQ ID NO: 115 - DNA, 4212 bp, Homo sapiens
  ref <308>: DATABASE ACCESSION NUMBER: NCBI / NM_000175
  ref <309>: DATABASE ENTRY DATE: 2011-12-25
  ref <313>: RELEVANT RESIDUES IN SEQ ID NO: (1)..(4212)
aggggtggggccgggccgggccgggccgggcgcctgcgccataaaggccgccgcgcgcccacgcgcctcgcttgctgcgcgctgccggcgctccttcctcctcggctcgcgtctcactcagtgtaccttctagtcccgccatggccgctctcacccgggacccccagttccagaagctgcagcaatggtaccgcgagcaccgctccgagctgaacctgcgccgcctcttcgatgccaacaaggaccgcttcaaccacttcagcttgaccctcaacaccaaccatgggcatatcctggtggattactccaagaacctggtgacggaggacgtgatgcggatgctggtggacttggccaagtccaggggcgtggaggccgcccgggagcggatgttcaatggtgagaagatcaactacaccgagggtcgagccgtgctgcacgtggctctgcggaaccggtcaaacacacccatcctggtagacggcaaggatgtgatgccagaggtcaacaaggttctggacaagatgaagtctttctgccagcgtgtccggagcggtgactggaaggggtacacaggcaagaccatcacggacgtcatcaacattggcattggcggctccgacctgggacccctcatggtgactgaagcccttaagccatactcttcaggaggtccccgcgtctggtatgtctccaacattgatggaactcacattgccaaaaccctggcccagctgaaccccgagtcctccctgttcatcattgcctccaagacctttactacccaggagaccatcacgaatgcagagacggcgaaggagtggtttctccaggcggccaaggatccttctgcagtggcgaagcactttgttgccctgtctactaacacaaccaaagtgaaggagtttggaattgaccctcaaaacatgttcgagttctgggattgggtgggaggacgctactcgctgtggtcggccatcggactctccattgccctgcacgtgggttttgacaacttcgagcagctgctctcgggggctcactggatggaccagcacttccgcacgacgcccctggagaagaacgcccccgtcttgctggccctgctgggtatctggtacatcaactgctttgggtgtgagacacacgccatgctgccctatgaccagtacctgcaccgctttgctgcgtacttccagcagggcgacatggagtccaatgggaaatacatcaccaaatctggaacccgtgtggaccaccagacaggccccattgtgtggggggagccagggaccaatggccagcatgctttttaccagctcatccaccaaggcaccaagatgataccctgtgacttcctcatcccggtccagacccagcaccccatacggaagggtctgcatcacaagatcctcctggccaacttcttggcccagacagaggccctgatgaggggaaaatcgacggaggaggcccgaaaggagctccaggctgcgggcaagagtccagaggaccttgagaggctgctgccacataaggtctttgaaggaaatcgcccaaccaactctattgtgttcaccaagctcacaccattcatgcttggagccttggtcgccatgtatgagcacaagatcttcgttcagggcatcatctgggacatcaacagctttgaccagtggggagtggagctgggaaagcagctggctaagaaaatagagcctgagcttgatggcagtgctcaagtgacctctcacgacgcttctaccaatgggctcatcaacttcatcaagcagcagcgcgaggccagagtccaataaactcgtgctcatctgcagcctcctctgtgactcccctttctcttctcgtccctcctccccggagccggcactgcatgttcctggacaccacccagagcaccctctggttgtgggcttggaccacgagcccttagcagggaaggctggtctcccccagcctaacccccagcccctccatgtctatgctccctctgtgttagaattggctgaagtgtttttgtgcagctgacttttctgacccatgttcacgttgttcacatcccatgtagaaaaataaagatgccacggaggaggttgtaggctcagcctctgattttttttttcctgtgatggtgctttatgtagcagagggcaggagcgctcagcaggacgcaggctgtgcctctgcggacacttaacactaagtggtgagcgggtctagagtggagcaaggtgccctgagaagacaatagtggggtgggggcacaatcagtcaggacggcaacttggcctgtgtcaccaaatcccaagactgttttccactcctcacctctgtgactgcagaaattggatactctgttcactcgatggttctaaaaactgcattgagattatgtttgtttcgggtgaattcctggacaagaccgaggatgactgccatctcctggcaagacgctcaggtagttcttttgctttaaaaggcagatattgaaaactggaattttttttttttgagtctcgctctgtcacccagactggagtgcagtggtgcaatctcggctcactgcaacctccgcctcccgggttcaagctattctcctgcctcagcctcccgagtagctgggattacacggcgcacaccaccatacccagctaatttttgtatttttagtagtgaaggggttttaccatgttgggcaggctggtcttgaactcctgacctcaggtgatctgcccgcctcagcctcccacagtgctgggattacaggtatgagccaccacgcccggcccattttttttttttttttgacaacttttttttttttttgagacagggtcttgttccattgcccagactggagtgcagtggcatgatcacagctcactgcagccagtaatcctcttgcctcagcctcccaagtagttgagactacaggttgtaccactatgccctgctagttttttcattttttgtagagagacgggtcttttttttttttgagacggagtctcgctctgtcgcccaagctggagtgcagtagcacggtctcagctcattgcaagctccgcctcccaggttcacgccattctcctgcctcagactcctgtgtagctgggagtacaggcacctgccaccatgcccggctaattttttatatatttttttagcagagacagtgtctcactgtgttagtcaggatggtctcgatctcctgacctcgtgatccgcccgcctcagcctcccaaagtgctgggattacaggcgtgagccaccgcgcccagcaaggcgggtcttgctgtgtttcccagactagactggtcttgaattccagggctcaagagatctcccacctcagcctcccacagtgctgggattacaggcgtgagccgccacacccagcctattcaaaatttttttttcttagagacagggtctttgttgcccaggctggactgcagtgatacaatcatagctgactgaagcctcaaattcccaggctaaggtgatcttctcacctcagccttccaagtagctgggtccgcagatgcatgccagtacacccagctcatttaaaaaaaaatttttttcttttttgagagtcttgctttgttgcccaggctggagtgcagtggtgtgatctcggctcactgcaagctccacctcccggcttcacgccattctcctgcctcagcctcccgagtagctgggactacaggtgcccgccaccacacccggctaattttttgtatttttagtagagacggggtttcaccgtgttagccaggatggtcttgatctcctgacctcatgatccgcctgctttggcctcccaaagtgctgggattacaggcgtgagtcaccgcgcccggctcattttaaaatttttgtagatcagtgtactgttgtaaaaaaaaaaaaataagaaaaataaaaaataaatttttgtagtgataggatcccactgaggccagagaatagggtctggagacaaaggagcattcacttcagcctctgactggtggcaggccaagtctttatttacatagggtgtaaccaaataggaaacctctaaagggtacttaaaccccagattttctacacagggcacttgcttgagcctcatcccgctttctggaatgtacttttgcttcaataaatctgtgcttttgttccttcaaaaaaaaaaaaaaaaaa

SEQ ID NO: 116 - DNA, 448 bp, Homo sapiens
  ref <308>: DATABASE ACCESSION NUMBER: NCBI / NM_001867
  ref <309>: DATABASE ENTRY DATE: 2011-11-20
  ref <313>: RELEVANT RESIDUES IN SEQ ID NO: (1)..(448)
caaggtcgtgaaaaaaaaggtcttggtgaggtgccgccatttcatctgtcctcattctctgcgcctttcgcagagcttccagcagcggtatgttgggccagagcatccggaggttcacaacctctgtggtccgtaggagccactatgaggagggccctgggaagaatttgccattttcagtggaaaacaagtggtcgttactagctaagatgtgtttgtactttggatctgcatttgctacacccttccttgtagtaagacaccaactgcttaaaacataaggatgtttcagttcctccatttaacagatatgaagagcattttaagaggtgcagcctctggaagtggatcaaactagaactcatatgccatactagatatgtttgtcaataaacttatgacgtgaaaaaaaaaaaaaaaaaaaaaaaaaaaaaaaaaaaaaaaaaaa

SEQ ID NO: 117 - DNA, 1905 bp, Homo sapiens
  ref <308>: DATABASE ACCESSION NUMBER: NCBI / NM_001967
  ref <309>: DATABASE ENTRY DATE: 2011-11-21
  ref <313>: RELEVANT RESIDUES IN SEQ ID NO: (1)..(1905)
gctgtcttttcagtcgggcgctgagtggtttttcggatcatgtctggtggctccgcggattataacagagaacatggcggcccagagggaatggaccccgatggtgtcatcgagagcaactggaatgagattgttgataactttgatgatatgaatttaaaggagtctctccttcgtggcatctatgcttacggttttgagaagccttccgctattcagcagagagctattattccctgtattaaagggtatgatgtgattgctcaagctcagtcaggtactggcaagacagccacatttgctatttccatcctgcaacagttggagattgagttcaaggagacccaagcactagtattggcccccaccagagaactggctcaacagatccaaaaggtaattctggcacttggagactatatgggagccacttgtcatgcctgcattggtggaacaaatgttcgaaatgaaatgcaaaaactgcaggctgaagcaccacatattgttgttggtacacccgggagagtgtttgatatgttaaacagaagatacctttctccaaaatggatcaaaatgtttgttttggatgaagcagatgaaatgttgagccgtggttttaaggatcaaatctatgagattttccaaaaactaaacacaagtattcaggttgtgttgctttctgccacaatgccaactgatgtgttggaagtgaccaaaaaattcatgagagatccaattcgaattctggtgaaaaaggaagaattgacccttgaaggaatcaaacagttttatattaatgttgagagagaggaatggaagttggatacactttgtgacttgtacgagacactgaccattacacaggctgttatttttctcaatacgaggcgcaaggtggactggctgactgagaagatgcatgccagagacttcacagtttctgctctgcatggtgacatggaccagaaggagagagatgttatcatgagggaattccggtcagggtcaagtcgtgttctgatcactactgacttgttggctcgcgggattgatgtgcaacaagtgtctttggttataaattatgatctacctaccaatcgtgaaaactatattcacagaattggcagagggggtcgatttgggaggaaaggtgtggctataaactttgttactgaagaagacaagaggattcttcgtgacattgagactttctacaatactacagtggaggagatgcccatgaatgtggctgaccttatttaattcctgggatgagagttttggatgcagtgctcgctgttgctgaataggcgatcacaacgtgcattgtgcttctttctttgggaatatttgaatcttgtctcaatgctcataacggatcagaaatacagattttgatagcaaagcgacgttagtcgtgagctcttgtgaggaaagtcattggctttatcctctttagagttagactgttggggtgggtataaaagatggggtctgtaaaatctttctttcttagaaatttatttcctagttctgtagaaatggttgtattagatgttctctatcatttaataatatacttgtggactaaaagatataagtgctgtataaaatcagccaattatgttaaactagcatatctgcctttattgtgtttgtcattagcctgagtagaaaggcctttaaaatttttttagaaagcatttgaatgcattttgtttggtattgtatttattcaataaagtatttaattagtgctaagtgtgaactggaccctgttgctaagccccagcaagcaatcctaggtagggtttaatccccagtaaaattgccatattgcacatgtcttaatgaagtttgaatgttaaataaattgtatattcactttaaaaaaaaaaaaaaaaa

SEQ ID NO: 118 - DNA, 590 bp, Homo sapiens
  ref <308>: DATABASE ACCESSION NUMBER: NCBI / NM_001863
  ref <309>: DATABASE ENTRY DATE: 2011-12-04
  ref <313>: RELEVANT RESIDUES IN SEQ ID NO: (1)..(590)
tgggcgtggcttgaatgacttcagtggcctcctcctgggagggagctgaagccgctcgcaagactcccgtagtccccacctctctcagcttccggctggtagtagttccgcttcctgtccgactgtggtgtctttgctgagggtcacattgagctgcaggttgaatccggggtgcctttaggattcagcaccatggcggaagacatggagaccaaaatcaagaactacaagaccgccccttttgacagccgcttccccaaccagaaccagactagaaactgctggcagaactacctggacttccaccgctgtcagaaggcaatgaccgctaaaggaggcgatatctctgtgtgcgaatggtaccagcgtgtgtaccagtccctctgccccacatcctgggtcacagactgggatgagcaacgggctgaaggcacgtttcccgggaagatctgaactggctgcatctccctttcctctgtcctccatccttctcccaggatggtgaagggggacctggtacccagtgatccccaccccaggatcctaaatcatgacttacctgctaataaaaactcattggaaaagtgaga

SEQ ID NO: 119 - DNA, 579 bp, Homo sapiens
  ref <308>: DATABASE ACCESSION NUMBER: NCBI / NM_001997
  ref <309>: DATABASE ENTRY DATE: 2011-11-28
  ref <313>: RELEVANT RESIDUES IN SEQ ID NO: (1)..(579)
gcgcggtcgctcagcagtgacgtgacacgcagcccacggtctgtactgacgcgccctcgcttcttcctctttctcgactccatcttcgcggtagctgggaccgccgttcagtcgccaatatgcagctctttgtccgcgcccaggagctacacaccttcgaggtgaccggccaggaaacggtcgcccagatcaaggctcatgtagcctcactggagggcattgccccggaagatcaagtcgtgctcctggcaggcgcgcccctggaggatgaggccactctgggccagtgcggggtggaggccctgactaccctggaagtagcaggccgcatgcttggaggtaaagtccatggttccctggcccgtgctggaaaagtgagaggtcagactcctaaggtggccaaacaggagaagaagaagaagaagacaggtcgggctaagcggcggatgcagtacaaccggcgctttgtcaacgttgtgcccacctttggcaagaagaagggccccaatgccaactcttaagtcttttgtaattctggctttctctaataaaaaagccacttagttcagtcatcgaaaa

SEQ ID NO: 120 - DNA, 3555 bp, Homo sapiens
  ref <308>: DATABASE ACCESSION NUMBER: NCBI / NM_002088
  ref <309>: DATABASE ENTRY DATE: 2011-11-19
  ref <313>: RELEVANT RESIDUES IN SEQ ID NO: (1)..(3555)
cgcggcagctgcgtccccatgaggaggggaggaagatgccggctgagctgctgctgctgctgattgttgccttcgccagccccagctgccaggtgctctcatcactgcgcatggctgcaatcctggatgatcagacagtgtgtggccgcggtgagcgtctggccttggccttggcccgggagcagatcaacgggatcatcgaggtcccagccaaggcccgagtggaagtagacatctttgagctgcagcgggacagccagtacgagaccacggacaccatgtgtcagatcttacccaaaggggttgtgtctgtccttgggccctcctctagcccagcatctgcctccaccgtgagccatatctgtggagagaaggagatcccccacatcaaggtgggtcccgaggagacaccccgccttcagtaccttcgcttcgcgtctgtcagcctgtaccccagtaacgaggacgtcagcttggcggtctcccgaatcctcaagtccttcaactacccctcggccagcctcatctgcgccaaggctgagtgcctgctgcgattggaggaactggtgcgtggcttcctcatctccaaggagacgctgtcagtgaggatgttggacgacagccgggaccccacaccactgctcaaggagatccgtgatgacaaggtgtccaccatcatcatcgacgccaacgcctccatctcccacctcatcctccgtaaggcctcggaactgggaatgacctcagcgttttacaagtacatcctcaccaccatggacttccccatcctgcatctggacggtattgtggaggactcctccaacatcctgggcttctccatgttcaacacgtcccaccccttctaccctgagtttgtccgcagcctcaacatgtcctggagggagaactgtgaagccagcacctacctgggccctgcgctgtcagccgccctgatgtttgacgccgtgcacgtggtggtgagcgctgtccgagagctgaaccgcagccaggagatcggtgtgaagcctctggcctgtacatcggccaacatttggccccacgggaccagcctcatgaactacctgcgcatggtagagtatgatgggctgaccgggcgggtcgagttcaacagcaaagggcagagaaccaactacaccctgcgcatcctagaaaagtcccggcagggccaccgtgagattggggtgtggtactctaaccgcaccctggccatgaatgccaccaccctggacatcaacctgtcgcagacactggccaacaagaccctggtggtcacaaccatcctggagaacccatacgtcatgcgccggcccaacttccaggccctgtcggggaacgaacgcttcgagggcttctgcgtggacatgctgcgggagctggccgagctgctgcgcttccgctaccgcctgcggttggtggaggatgggctgtacggggcgcccgagcccaacggctcctggacgggcatggttggcgagctcatcaaccggaaggcagacctggctgtggccgccttcaccatcacagctgagcgggagaaggtcatcgacttttccaagccctttatgaccctggggatcagcatcctctaccgagtgcacatgggccgcaagcctggctacttctccttcctggaccccttctcccctgctgtgtggctcttcatgcttcttgcctacctggctgtcagctgcgtcctgtttctggctgccaggctgagcccctatgagtggtataacccacacccatgcctgcgggcacgcccccacatcctggagaaccagtacacgctgggcaacagcctgtggtttcccgtggggggcttcatgcagcagggctcggagatcatgccccgggcgctgtccacgcgctgtgtcagcggagtctggtgggccttcaccttgatcatcatctcctcctacacggccaacctggccgccttcctcaccgtgcagcgcatggaggtgcctgtggagtcggccgatgacctggcagatcagaccaacatcgagtatggcaccatccacgccggctccaccatgaccttcttccagaattcacggtaccaaacgtaccagcgcatgtggaactacatgcagtcgaagcagcccagcgtgttcgtcaagagcacagaagagggcattgcccgcgtcctcaactcccgctacgccttcctgctcgagtccaccatgaacgaataccaccggcgcctcaactgcaacctcacccagatcgggggactcctcgacaccaagggctacggcattggcatgccgctgggctccccgttccgggatgagatcacactggccatcctgcagcttcaggagaacaaccggctggagatcctgaagcgcaagtggtgggaggggggccggtgccccaaggaggaggaccatcgagctaaaggtttgggcatggagaacattggtggcatttttatcgtgctcatctgtggcctcatcattgctgtcttcgtggcggtcatggaattcatatggtccacacggaggtcagctgagtccgaggaggtgtcggtgtgccaggagatgctgcaggagctgcgccacgccgtttcttgccgcaagacgtcgcgttcccgccggcgccgacgcccgggcggcccgagccgggccctgctgtcactgcgcgcggtccgcgagatgcgcctcagcaacggcaagctctactcggccggcgcgggcggggatgcgggcagcgcgcacgggggcccgcagcgcctcctggacgacccggggccccccagcggagcccgacccgccgcccccaccccctgcacccacgtgcgcgtctgccaggagtgccggcgcatccaggcgctgcgggcctcgggggccggcgcgcctccgcgtggcctgggcgtccccgccgaagccaccagcccgccccggccgcggcctggccccgccggcccccgggagctggcggagcacgagtgaccacgggcggggctgtgcgggcgcccggactgaccgaagggacggggcccgccccaggccccagcagtctccgctcccgcagcgggcgcgggacaggacttgtgcgccggcgccccggacgccgcgattttgcctttggttccccgcgaagtccgaggcctggctctggagcccgcctgcgccccccagtggactcgcgagagggtgccgcgggcgagaagggcgcaggaaccgaggactccaggggctggggacttcgggggcggctctgggaagcggaaagcagtcagcggagaggaccccattctgggactgctcaggctccccaagacttgacgcagccccccacgcttctggaggtggggagggcctctggacagatgggtgtcccctggtgcccctccactcttctcttcctctcttttttggggggagaaacctcggaatttctatgagacctcccccagggagggggtcagttgggcccccatccctccccttgccacatcgcagcccctgttggaataaaaaaaagaacaaaaccccagaaaaaaaaaaaaaaaaaaaaaaaaaaaaa

SEQ ID NO: 121 - DNA, 523 bp, Homo sapiens
  ref <308>: DATABASE ACCESSION NUMBER: NCBI / NM_001862
  ref <309>: DATABASE ENTRY DATE: 2011-11-20
  ref <313>: RELEVANT RESIDUES IN SEQ ID NO: (1)..(523)
cggaagttttgctgctagtcgcggacgcaatggcttcaaggttacttcgcggagctggaacgctggccgcgcaggccctgagggctcgcggccccagtggcgcggccgcgatgcgctccatggcatctggaggtggtgttcccactgatgaagagcaggcgactgggttggagagggagatcatgctggctgcaaagaagggactggacccatacaatgtactggccccaaagggagcttcaggcaccagggaagaccctaatttagtcccctccatctccaacaagagaatagtaggctgcatctgtgaagaggacaataccagcgtcgtctggttttggctgcacaaaggcgaggcccagcgatgcccccgctgtggagcccattacaagctggtgccccagcagctggcacactgagcacctgcactaaattactcaaaatgtgctgtaaagtttcttctttccagtaaagactagccattgcattggctccttctcccataaaaaaaaaaaaaaaaaaa

SEQ ID NO: 122 - DNA, 784 bp, Homo sapiens
  ref <308>: DATABASE ACCESSION NUMBER: NCBI / NM_004255
  ref <309>: DATABASE ENTRY DATE: 2011-11-26
  ref <313>: RELEVANT RESIDUES IN SEQ ID NO: (1)..(784)
gcccacgcgccagagtcgcagtgggcgggcctacgtgctccgcccgctgtgagcctgtccggcccccgcccgctccggagcaacccgcgagcttacaccggcttctctctgtcctcagcccgcgcgccgccatcgccgtcatgctgggcgccgctctccgccgctgcgctgtggccgcaaccacccgggccgaccctcgaggcctcctgcactccgcccggacccccggccccgccgtggctatccagtcagttcgctgctattcccatgggtcacaggagacagatgaggagtttgatgctcgctgggtaacatacttcaacaagccagatatagatgcctgggaattgcgtaaagggataaacacacttgttacctatgatatggttccagagcccaaaatcattgatgctgctttgcgggcatgcagacggttaaatgattttgctagtacagttcgtatcctagaggttgttaaggacaaagcaggacctcataaggaaatctacccctatgtcatccaggaacttagaccaactttaaatgaactgggaatctccactccggaggaactgggccttgacaaagtgtaaaccgcatggatgggcttccccaaggatttattgacattgctacttgagtgtgaacagttacctggaaatactgatgataacatattaccttatttgaacaagttttcctttattgagtaccaagccatgtaatggtaacttggactttaataaaagggaaatgagtttgaactgaaaaaaaaaaaaaaaaa

SEQ ID NO: 123 - DNA, 4380 bp, Homo sapiens
  ref <308>: DATABASE ACCESSION NUMBER: NCBI / NM_001788
  ref <309>: DATABASE ENTRY DATE: 2011-12-24
  ref <313>: RELEVANT RESIDUES IN SEQ ID NO: (1)..(4380)
gagatggaagccagcctccgctaggcccggaagcctcgtctgagggggcgggggacggaggagggagcgggagtcgagcgagagcctgtggaggagtccgcctgctgtagcgtgcgtaagcaaggcagctacgccgggcggctacgctgcggaatcggcgtaggcgcctttggagaatcggcgggctgcgctccgctggggctggtcgcggagggggggaggggatgtcggtcagtgcgagatccgctgctgctgaggagaggagcgtcaacagcagcaccatggtagctcaacagaagaaccttgaaggctatgtgggatttgccaatctcccaaatcaagtatacagaaaatcggtgaagagaggttttgaattcacgcttatggtagtgggtgaatctggattgggaaagtcgacattaatcaactcattattcctcacagatttgtattctccagagtatccaggtccttctcatagaattaaaaagactgtacaggtggaacaatccaaagttttaatcaaagaaggtggtgttcagttgctgctcacaatagttgataccccaggatttggagatgcagtggataatagtaattgctggcagcctgttatcgactacattgatagtaaatttgaggactacctaaatgcagaatcacgagtgaacagacgtcagatgcctgataacagggtgcagtgttgtttatacttcattgctccttcaggacatggacttaaaccattggatattgagtttatgaagcgtttgcatgaaaaagtgaatatcatcccacttattgccaaagcagacacactcacaccagaggaatgccaacagtttaaaaaacagataatgaaagaaatccaagaacataaaattaaaatatacgaatttccagaaacagatgatgaagaagaaaataaacttgttaaaaagataaaggaccgtttacctcttgctgtggtaggtagtaatactatcattgaagttaatggcaaaagggtcagaggaaggcagtatccttggggtgttgctgaagttgaaaatggtgaacattgtgattttacaatcctaagaaatatgttgataagaacacacatgcaggacttgaaagatgttactaataatgtccactatgagaactacagaagcagaaaacttgcagctgtgacttataatggagttgataacaacaagaataaagggcagctgactaagagccctctggcacaaatggaagaagaaagaagggagcatgtagctaaaatgaagaagatggagatggagatggagcaggtgtttgagatgaaggtcaaagaaaaagttcaaaaactgaaggactctgaagctgagctccagcggcgccatgagcaaatgaaaaagaatttggaagcacagcacaaagaattggaggaaaaacgtcgtcagttcgaggatgagaaagcaaactgggaagctcaacaacgtattttagaacaacagaactcttcaagaaccttggaaaagaacaagaagaaagggaagatcttttaaactctctattgaccaccagttaacgtattagttgccaatatgccagcttggacatcagtgtttgttggatccgtttgaccaatttgcaccagttttatccataatgatggatttaacagcatgacaaaaattatttttttttttgttcttgatggagattaagatgccttgaattgtctagggtgttctgtacttagaaagtaagagctctaagtacctttcctacattttctttttttattaaacagatatcttcagtttaatgcaagagaacattttactgttgtacaatcatgttctggtggtttgattgtttacaggatattccaaaataaaaggactctggaagattttcattgaggataaattgccataatatgatgcaaactgtgcttctctatgataattacaatacaaaggttccattcagtgcagcatatacaataatgtaatttagtctaacacagttgaccctattttttgacacttccattgtttaaaaatacacatggaaaaaaaaaaaaccctatatgcttactgtgcacctagagcttttttataacaacgtctttttgtttgtttgttttggattctttaaatatatattattctcatttagtgccctctttagccagaatctcattactgcttcatttttgtaataacatttaatttagatattttccatatattggcactgctaaaatagaatatagcatctttcatatggtaggaaccaacaaggaaactttcctttaactccctttttacactttatggtaagtagcagggggggaaatgcatttatagatcatttctaggcaaaattgtgaagctaatgaccaacctgtttctacctatatgcagtctctttattttactagaaatgggaatcatggcctcttgaagagaaaaaagtcaccattctgcatttagctgtattcatatattgcatttctgtattttttgtttgtattgtaaaaaattcacataataaacgatgttgtgatgtaatattgtgtgaggtcttaaatatcctacagtcgatgtacaagagtagagtatgtttgggaagaaacttttcagcttaagtttgcctcctctacaatgacatcttttatatgcttgtctcatttagaatgcatatgtgctgattttctaatttaagagataccatatctctctattcatttctatctctcatttgtatgcttatttttctgagaacattttttttttcccccagacagggtcttgcttcattgcccaggctggagtgcggtggcacaaacacgacttgactgcagcctcaaccctctgggctcaagcagtcctcctgcctcagccccctgagtatctgggattgcaggcgtgcaccaccacgcctggctaatttttgtattttttgcagcctcccaaagttctgggattacaggcatgagccgtcatgcctggcctctgagaacagtttctgactcattcagattaggtatactctcaagtccctggaaactgaaattttttttaactgtaaagagggtagtgtcatttcttttcttaaggtcaagtgacatagattttaatgtaatgcataatttaggtaagaaattaattaatgtagcctagtttattatcttgaaatgttttaccctatttactttttaaaattaatgacctaagcggagggaataattataagtcaatagcagagagattgttgtttgggtgtttatttttttcagtttttgttttgagagattgggttaacacctctagccaaaattgtttggttttagggaggctaacaataacctactgaatttggaaaatgcaaaggtaaaaaatgtatatagactgcctgctgaactggttaagtactactgcttctgggaaatactatttcaaaattctatgtattataataataaatttgtaagacattcattattctaccatcctaatgaaaactttcagaagtctttctttatccatggcatgcccagggttttacctgaatctgatacaggatctatataactttactaggacttttgattgttgactccaggcttaggtatatcagaaggttctttttgccatttggcctgtggatgtctgagaagatcattcacaatacatgtaaaattcaggtaggcctaaggaaaggccagcctgtagaaagcaaaatggcagtgtctgttctccactgttggaggcattatgtaatttaagtatcctgttagccactgtctttctgctaattaagtggggctgaacaagtaagcactaataataccagtgaaccacttgggcaccttgtgggtagagttttgctgccacctagtggaatgggatatcattgcttccatatcaggttcacaagcaagttaagtgggcacagtttatttctgtgtagctcaggctgtaatcttgaaagctgaggagatacccatgcctctcagactcattagctgggtgtcacattaccacctgcacattctgacccaccgcatcttaatatgttttgtcctcttggagaaactaggagtagaagtcaggatatggtaggtaagggggaaaaaggaaagacggcttgatagctatgaatgcatgaggagcgaaatgttgactcagttatctagatcatggtctccaaacctgatgctatttccttacaaaaatatttgttgagcatgtgtccataattatatgtattgaacaatgaaaatatgtgtcaacaaatgtactgctacactaatgtgaacattatggaacaaaatttgaaagagtgaaataaaaggtttacactttcaaaaaaaaaaaaaaaaaaaaaaaaaaaaaa

SEQ ID NO: 124 - DNA, 2225 bp, Homo sapiens
  ref <308>: DATABASE ACCESSION NUMBER: NCBI / NM_004781
  ref <309>: DATABASE ENTRY DATE: 2011-11-20
  ref <313>: RELEVANT RESIDUES IN SEQ ID NO: (1)..(2225)
agtgacgtctttgccccgcgccgcgccgtcccacccatctccctggcctccggtcccaacttcgcttctctgctgaccctctctcgtcgccgctgccgccgccgcagctgccaaaatgtctacaggtccaactgctgccactggcagtaatcgaagacttcagcagacacaaaatcaagtagatgaggtggtggacataatgcgagttaacgtggacaaggttctggaaagagaccagaagctctctgagttagacgaccgtgcagacgcactgcaggcaggcgcttctcaatttgaaacgagcgcagccaagttgaagaggaaatattggtggaagaattgcaagatgtgggcaatcgggattactgttctggttatcttcatcatcatcatcatcgtgtgggttgtctcttcatgaagaaccagcggaactcaaaactgctgttcaagaaacctcttcaagacttttgacttagaacctgctatattatcaagcttacctactgttatctctaaaattttttttgtgttaatgtaaagttgaatttctaggaaacgtgcctttgttttttaatatgcactccaaattagaaggccggccccgtccacattttgcacagtgcctttacagatttacgtatgggctgatgaagaggccttcttaagttccagagtgctataatctagatgtaatgttgtcactaattaattgccattactcccagttagttacccttgtcatttggcattattttcagaaccacattttaaacctttgggtaatcagatttccaacttatgccttccagaaaaaaacactactgcctaacacaaatctgtgataacaacaggctgtgccttattttgataattttctgattccctagaagagaaccctctactttttgtaagcactactgactctcgctgtatttaagatgctggtgaagagcttttgctcttgcattagatttgaagatgtttacattgttgttattgttatgtatcacttgctaaaaatattgttttaatcagagataacctctttaaaaaaatttttaaagaactatggctatgaccaaagcttctattttgccaaaaagttaaataccgataaaatggccttaagtgtattcctgacagttaaattcagaaacgtgccaaatggaactcaaggtgccccttcagaattaaaatcattaccttgtgtgtgaaccttctacatcttcataggcctttcttccttttgaaaggctgtagacagtgtggctccccttctgattcagtattttgcatgggggttagagaaggtttgaggtagactctgaccgtctcataaaagagttctacccagcagttggcagattatcagctgtggactccagcatgtttctgataattatgcaagcaacaattctgtagcctcaagtaagaccacctgtgaacttgatcattatctggcccaaatatgaagataaactataactttggagtttgtttcctatttgtattcacattctgcttcctaaatcagttttctaaattatgcctgcaattaggcattggtcaggggtgaatggctcttttcacagagagtagccaaccagagacctttgctttgatatcatcaactgcagagaatgctgttgatgggaatgctggaagcagaaactttgtcatcggaaaaacttttcttgtatgcatgagactcaacatcaggatccacagcttaaagatgggaattcaggtatgaaagaaaacaggcaaggaggcactgagggagaaagacacagactttatcgctctgtggctcattgttactggaatattctaaaactcttgttcacatgctattatgacttataaagcagcaacagctgaggcgcaccaggacacagcttccatttctttaacgtctgttcccttaacatcgctgaaatgatttactgttgaagagatgccttgcggtgtggccagctgtgaggagaaagcagctggcagtgttaggacattagtccaccttcagcgcagggtctctggccgggtctgactcagaaaccttggtactcgccccttggccacagtgcccagacccatgtaacccactggctcctgcattaacccagaaatacctcgcttctatctgtgcacttagctgggaacttacccactgtaatcacctaaataaagtgtttataaacatgaaaaaaaaaaaaaaaaaaaaa

SEQ ID NO: 125 - DNA, 2105 bp, Homo sapiens
  ref <308>: DATABASE ACCESSION NUMBER: NCBI / NM_003801
  ref <309>: DATABASE ENTRY DATE: 2011-11-20
  ref <313>: RELEVANT RESIDUES IN SEQ ID NO: (1)..(2105)
cggaagtgcgggcgagcgcgggtccccgggtctgacaggagcagcctgtgggcaccgcggcggtagttggaggcgggagagggtccgtagccgcgccgccctgccccgccatgggcctcctgtcggacccggttcgccggcgcgcgctcgcccgcctagtgctgcgcctcaacgcgccgttgtgcgtgctgagctacgtggcgggcatcgcctggttcttggcgctggttttcccgccgctgacccagcgcacttacatgtcggagaacgccatgggctccaccatggtggaggagcagtttgcgggcggagaccgtgcccgggcttttgcccgggacttcgccgcccaccgcaagaagtcgggggctctgccagtggcctggcttgaacggacgatgcggtcagtagggctggaggtctacacgcagagtttctcccggaaactgcccttcccagatgagacccacgagcgctatatggtgtcgggcaccaacgtgtacggcatcctgcgggccccgcgtgctgccagcaccgagtcgcttgtgctcaccgtgccctgtggctctgactctaccaacagccaggctgtggggctgctgctggcactggctgcccacttccgggggcagatttattgggccaaagatatcgtcttcctggtaacagaacatgaccttctgggcactgaggcttggcttgaagcctaccacgatgtcaatgtcactggcatgcagtcgtctcccctgcagggccgagctggggccattcaggcagccgtggccctggagctgagcagtgatgtggtcaccagcctcgatgtggccgtggaggggcttaacgggcagctgcccaaccttgacctgctcaatctcttccagaccttctgccagaaagggggcctgttgtgcacgcttcagggcaagctgcagcccgaggactggacatcattggatggaccgctgcagggcctgcagacactgctgctcatggttctgcggcaggcctccggccgcccccacggctcccatggcctcttcctgcgctaccgtgtggaggccctaaccctgcgtggcatcaatagcttccgccagtacaagtatgacctggtggcagtgggcaaggctttggagggcatgttccgcaagctcaaccacctcctggagcgcctgcaccagtccttcttcctctacttgctccccggcctctcccgcttcgtctccatcggcctctacatgcccgctgtcggcttcttgctcctggtccttggtctcaaggctctggaactgtggatgcagctgcatgaggctggaatgggccttgaggagcccgggggtgcccctggccccagtgtaccccttcccccatcacagggtgtggggctggcctcgctcgtggcacctctgctgatctcacaggccatgggactggccctctatgtcctgccagtgctgggccaacacgttgccacccagcacttcccagtggcagaggctgaggctgtggtgctgacactgctggcgatttatgcagctggcctggccctgccccacaatacccaccgggtggtaagcacacaggccccagacaggggctggatggcactgaagctggtagccctgatctacctagcactgcagctgggctgcatcgccctcaccaacttctcactgggcttcctgctggccaccaccatggtgcccactgctgcgcttgccaagcctcatgggccccggaccctctatgctgccctgctggtgctgaccagcccggcagccacgctccttggcagcctgttcctgtggcgggagctgcaggaggcgccactgtcactggccgagggctggcagctcttcctggcagcgctagcccagggtgtgctggagcaccacacctacggcgccctgctcttcccactgctgtccctgggcctctacccctgctggctgcttttctggaatgtgctcttctggaagtgagatctgcctgtccgggctgggacagagactccccaaggaccccattctgcctccttctggggaaataaatgagtgtctgtttcagcagctaaaaaaaaaaaaaaaaaaaaaaaaaaaaaaaaaaaaaaa

SEQ ID NO: 126 - DNA, 3118 bp, Homo sapiens
  ref <308>: DATABASE ACCESSION NUMBER: NCBI / NM_004643
  ref <309>: DATABASE ENTRY DATE: 2011-12-25
  ref <313>: RELEVANT RESIDUES IN SEQ ID NO: (1)..(3118)
aatgaagggtggcacccaaatccccaatcaatgcctgttcaatcaacaaacatctaacaggacattatgtggtaggcatattgccaggccgtggagatgcgaatataaataggaaccggcccctcatctgcaggcgctcacaacctagttaggaaacagtaaaacaattaagcgcgccgtggagataggcccacttgtcctgggaaatgaggggaagctggggtttgcagtggtttgattgaagggggactacatgttagaggcacagactgggtgcaggtacacccaaaggaacgagaagagtggaaggaaacaacatccacaaagtaaccacatgctggcgtatcgaaggccgtgatttacggttttgagactttacctcgccagcaaaggggggccagtctgttagcggtgcagattggaggggtgacattggaagctgtccaggaaaaagaaaatggaactggggagcagaaggcctacgcaagagggcgggacagacaggacttgtgactagtagctctggactgaggaatcctccctgctttctggtgcgggagagctagtggatgatggtgccaataacctggatggggaaagtaagctccctcctggaatgcttcattcacaacctccattttcagcaacatcccatctactggtgcttcctggtcgagatacaagtttcctgaaactgctgctctgttttgggcctcacccggccaacagctcactagctggcaagcagtagtatcaagatggcggccccctaggactggctagtcatgtgacctcgggtttcccaagtttgaagcccggcagtcctttcgggggcaaggttcacctgtcacgaaacgagtgtcaccccttcgactctcgcaagccaatcggcatctgagactgggccactgcggtgaggcgatcggaagattggtcctttccagtcgcctagctagggccaatcacggagcgtcccatacttcgcgggcccgcccgtaggccggggagaagcaggaatatcgtcacagcgtggcggtattattacctaaggactcgataggaggtgggacgcgtgttgattgacaggcagatttcccctaccgggatttgagaatttggcgcagtgccccgccttagaggtggggccttatttgattgccaagtaatattccccaatggagtactagctcatggtgacgggcaggcagcttgactaatgagtcctcggcgtggccggcgcagctctccaatcgccgggcggcgggccccagtctgagcggcgatggcggcggcggcggcggcggcagcagcagcgggggctgcgggcggtcggggctccgggccggggcggcggcgccatcttgtgcccggggccggtggggaggccggggagggggccccggggggcgcaggggactacgggaacggcctggagtctgaggaactggagcctgaggagctgctgctggagcccgagccggagcccgagcccgaagaggagccgccccggccccgcgcccccccgggagctccgggccctgggcctggttcgggagcccccggcagccaagaggaggaggaggagccgggactggtcgagggtgacccgggggacggcgccattgaggacccggagctggaagctatcaaagctcgagtcagggagatggaggaagaagctgagaagctaaaggagctacagaacgaggtagagaagcagatgaatatgagtccacctccaggcaatgctggcccggtgatcatgtccattgaggagaagatggaggctgatgcccgttccatctatgttggcaatgtggactatggtgcaacagcagaagagctggaagctcactttcatggctgtggttcagtcaaccgtgttaccatactgtgtgacaaatttagtggccatcccaaagggtttgcgtatatagagttctcagacaaagagtcagtgaggacttccttggccttagatgagtccctatttagaggaaggcaaatcaaggtgatcccaaaacgaaccaacagaccaggcatcagcacaacagaccggggttttccacgagcccgctaccgcgcccggaccaccaactacaacagctcccgctctcgattctacagtggttttaacagcaggccccggggtcgcgtctacaggggccgggctagagcgacatcatggtattccccttactaaaaaaagtgtgtattaggaggagagagaggaaaaaaagaggaaagaaggaaaaaaaaaagaattaaaaaaaaaaaaaagaaaaacagaagatgaccttgatggaaaaaaaatattttttaaaaaaaagatatactgtggaaggggggagaatcccataactaactgctgaggagggacctgctttggggagtaggggaaggcccagggagtggggcagggggctgcttattcactctggggattcgccatggacacgtctcaactgcgcaagctgctgcccatgtttccctgccccacttcacccccttgggggctgctcaagggtaggtgggcgtgggtggtaggaggtttttttttttacccagggctctggaaggacaccaaactgttctgcttgttaccttccctccgtcttctcctcgcctttcacagtcccctcctgcctgctcctgtccagccaggtctaccacccaccccacccctcttctccggctccctgcccctccagattgcctggtgatctattttgtttccttttgtgtttctttttctgttttgagtgtctttctttgcaggtttctgtagccggaagatctccgttccgctcccagcggctccagtgtaaattccccttccccctggggaaatgcactaccttgttttggggggtttaggggtgtttttgtttttcagttgttttgtttttttgttttttttttttttcctttgccttttttcccttttatttggagggaatgggaggaagtgggaacagggaggtgggaggtggattttgtttatttttttagctcatttccaggggtgggaatttttttttaatatgtgtcatgaataaagttgtttttgaaaataaaaattgtttggccttttgggtgtaaaaaaaaaaaaaaaaaa

SEQ ID NO: 127 - DNA, 1919 bp, Homo sapiens
  ref <308>: DATABASE ACCESSION NUMBER: NCBI / NM_001537
  ref <309>: DATABASE ENTRY DATE: 2011-12-17
  ref <313>: RELEVANT RESIDUES IN SEQ ID NO: (1)..(1919)
cgagaagcagcggcccggggcgactgagcggacaaacggaagtgtaggttacggtctgagacatcaccgccaagctgggcatcggggagatggccgagactgaccccaagaccgtgcaggacctcacctcggtggtgcagacactcctgcagcagatgcaagataaatttcagaccatgtctgaccagatcattgggagaattgatgatatgagtagtcgcattgatgatctggaaaagaatatcgcggacctcatgacacaggctggggtggaagaactggaaagtgaaaacaagatacctgccacgcaaaagagttgaaggttgctaataatttatactggaatctggcatttttccaagccaagagaagatcgaatggctttttgcagctaactactatgtgtagacaggttttatattataaagtatgcattcttatcacctagtatatagttagtttgtagagtgatttccccccagtttcttgaacatggtatcttcacatcttggaccttggtcagttgtgctattcattattaaacactaaaactttggcggttcttgcataacattgtcagattttttagtgtatttctgtgaagtcattttttttcttgtcattccttttgtagtagttgctgtttggataaaagttgatgtgtgattttttattaaacaaatagtaaacccttcaattatagttagtcttggtgaagtaagatgtttgtagactttagagttctttaattcttggcacaacgtgactgttgagctaacaccaaatagtgtgttggcaatacttttcaaatggctgaaaacacctaaaaattgttcattcagaaatatctgtcactgctctgttgccaaaactcagaatagaacttagacgtatgtctgagtccctgagatcacatgctaaagtcgatgaaaagtaaccactgccactgtcttgtgtcagaacttttacagtacagaaaataacagaatagccttctgtaatgaggcgtttgttagagttttgcatgagattctaatacttcagtaggaccctacctacgtggttcatctacaatggttaccataaaaaatctggcaggattttaaaactcaatcagtctttcctttgagctagtgacttgaaaagaaagagagaaggaaaagagaccatattaagtccatgccagttgcttggctagaatatgatcaacgacttgtagtagactcaagtttttaaaaaacactattttacttaaactgtttcttatctaaattcttgcagagtgtcaatgttatcattgattatagaagacagggataatacctttatctctggccactcaaaaatgcagtgccaggagtgctaaacctagaggccaatactgatgacctggaaggtgatccatatgattgtcaccacaaagtgcttttacacaaaaacttgaaaatttgaaaaacatgatttttttaagtttctcatctcaccagtcttggtgtttatattgcaaatctatcaaagtaagaaataatttgtgctgtatacaaattacatggggaacataaaggagtgagatccttctgtgataaaatgaattcaccactctggttacccaactacagaacctcctttgatcaggccagtaggttgtgatgcaggctggagcccccgaatgccccacacacactgcagcattgaccagaccatccgaaacctgcgtccctggtgatgttctcaagcctcggaagtggcaaatggaaatgatatggccggttgcggttgtaggagagttgtgacttaggcaggagtcgacctcctcaagtaatggaacgatttcaaaggcaggctgccctgaccaaaaatatctgccatgaataaaggtgcctgaaatcctaaaaaaaaaaaagaaaaaaaaaaaaaaa

SEQ ID NO: 128 - DNA, 3117 bp, Homo sapiens
  ref <308>: DATABASE ACCESSION NUMBER: NCBI / NM_003680
  ref <309>: DATABASE ENTRY DATE: 2011-11-27
  ref <313>: RELEVANT RESIDUES IN SEQ ID NO: (1)..(3117)
gcaacagcctcccgccgagccggccgggacagaggcggcccccacccccactgggcaggggactgcagacggcgctccccgactctcaagacgaccagggagcttcccttttcctcagcggggtgaggggcatctgtcgcccgccgacttggaggtggaggggcagggacattccctcgccatcacctcaggagctagaacgcgcccttctcgcagcagggcgtgggcctcccaatccctccaaggggcggacggcgtgcgcaaccccctggagaagcaacaggcgcccccatccccctccaagccgggtaacgccgaccccctcgtccctcccgctcttcacctccggaagccgggccaaagcctgggcgaacgactgcgcctcactccgccccctgcgccattttatcgccccctccccgacctcccctaccccgagtcagccgggccaacaccagggggagggcaaaccagcagtgattggcaggaaaccgtcccgcctctaggagggttgtgccccgctcaggcgcctcagccccgccctccgcaccgcccaccgtgcccactggctccaccttttcccgtctcatcgacctgctcgactctctgctgctcctcactttttccggccgctgccggaggggtccaggccgagtaagcggagcgccgagcccagctgatgcaacctggctggactcgcgtgacagttcccggcacgcggcggcgacggtgacccaggaaggggctctggtgccgggctgagcgggggaagcaggggtagcggagccatgggggacgctcccagccctgaagagaaactgcaccttatcacccggaacctgcaggaggttctgggggaagagaagctgaaggagatactgaaggagcgggaacttaaaatttactggggaacggcaaccacgggcaaaccacatgtggcttactttgtgcccatgtcaaagattgcagacttcttaaaggcagggtgtgaggtaacaattctgtttgcggacctccacgcatacctggataacatgaaagccccatgggaacttctagaactccgagtcagttactatgagaatgtgatcaaagcaatgctggagagcattggtgtgcccttggagaagctcaagttcatcaaaggcactgattaccagctcagcaaagagtacacactagatgtgtacagactctcctccgtggtcacacagcacgattccaagaaggctggagctgaggtggtaaagcaggtggagcaccctttgctgagtggcctcttataccccggactgcaggctttggatgaagagtatttaaaagtagatgcccaatttggaggcattgatcagagaaagattttcacctttgcagagaagtacctccctgcacttggctattcaaaacgggtccatctgatgaatcctatggttccaggattaacaggcagcaaaatgagctcttcagaagaggagtccaagattgatctccttgatcggaaggaggatgtgaagaaaaaactgaagaaggccttctgtgagccaggaaatgtggagaacaatggggttctgtccttcatcaagcatgtcctttttccccttaagtccgagtttgtgatcctacgagatgagaaatggggtggaaacaaaacctacacagcttacgtggacctggaaaaggactttgctgctgaggttgtacatcctggagacctgaagaattctgttgaagtcgcactgaacaagttgctggatccaatccgggaaaagtttaatacccctgccctgaaaaaactggccagcgctgcctacccagatccctcaaagcagaagccaatggccaaaggccctgccaagaattcagaaccagaggaggtcatcccatcccggctggatatccgtgtggggaaaatcatcactgtggagaagcacccagatgcagacagcctgtatgtagagaagattgacgtgggggaagctgaaccacggactgtggtgagcggcctggtacagttcgtgcccaaggaggaactgcaggacaggctggtagtggtgctgtgcaacctgaaaccccagaagatgagaggagtcgagtcccaaggcatgcttctgtgtgcttctatagaagggataaaccgccaggttgaacctctggaccctccggcaggctctgctcctggtgagcacgtgtttgtgaagggctatgaaaagggccaaccagatgaggagctcaagcccaagaagaaagtcttcgagaagttgcaggctgacttcaaaatttctgaggagtgcatcgcacagtggaagcaaaccaacttcatgaccaagctgggctccatttcctgtaaatcgctgaaaggggggaacattagctagccagcccagcatcttccccccttcttccaccactgagtcatctgctgtctcttcagtctgctccatccatcacccatttacccatctctcaggacacggaagcagcgggtttggactctttattcggtgcagaactcggcaaggggcagcttaccctccccagaacccaggatcatcctgtctggctgcagtgagagaccaacccctaacaagggctgggccacagcagggagtccagccctaccttcttcccttggcagctggagaaatctggtttcaatataactcatttaaaaatttatgccacagtccttataattggaaaaatactggtgcccaggttttcttggagttatccaagcagctgcgcccctagctgggatctggtacctggactaggctaattacagcttctccccaacaggaaactgtgggatttgaaaaggaaagggaagggaaaacagagaacctagtggtctaccaagtggttggcaactttcccaatgtctgcttactctgaggcttggcactgggggccagggcctgccccagggctcctggaatttcccttgatccagctaggctgggacactccctaaatcagctgcgtgttgttagcatcaggcagaatgaatggcagagagtgattctgtcttcatagagggtggggtacttctccataaggcatctcagtcaaatccccatcactgtcataaattcaaataaaatgtctgaacaaggg

SEQ ID NO: 129 - DNA, 2871 bp, Homo sapiens
  ref <308>: DATABASE ACCESSION NUMBER: NCBI / NM_003345
  ref <309>: DATABASE ENTRY DATE: 2011-12-25
  ref <313>: RELEVANT RESIDUES IN SEQ ID NO: (1)..(2871)
gcccgcgccagggtcctcggagctgctctggctgcgcgcggagcgggctccggagggaagtcccgagacaaagggaagcgccgccgccgccgccccgctcggtcctccacctgtccgctacgctcgccggggctgcggccgcccgagggactttgaacatgtcggggatcgccctcagcagactcgcccaggagaggaaagcatggaggaaagaccacccatttggtttcgtggctgtcccaacaaaaaatcccgatggcacgatgaacctcatgaactgggagtgcgccattccaggaaagaaagggactccgtgggaaggaggcttgtttaaactacggatgcttttcaaagatgattatccatcttcgccaccaaaatgtaaattcgaaccaccattatttcacccgaatgtgtacccttcggggacagtgtgcctgtccatcttagaggaggacaaggactggaggccagccatcacaatcaaacagatcctattaggaatacaggaacttctaaatgaaccaaatatccaagacccagctcaagcagaggcctacacgatttactgccaaaacagagtggagtacgagaaaagggtccgagcacaagccaagaagtttgcgccctcataagcagcgaccttgtggcatcgtcaaaaggaagggattggtttggcaagaacttgtttacaacatttttgcaaatctaaagttgctccatacaatgactagtcacctgggggggttgggcgggcgccatcttccattgccgccgcgggtgtgcggtctcgattcgctgaattgcccgtttccatacagggtctcttccttcggtcttttgtatttttgattgttatgtaaaactcgcttttattttaatattgatgtcagtatttcaactgctgtaaaattataaacttttatacttgggtaagtcccccaggggcgagttcctcgctctgggatgcaggcatgcttctcaccgtgcagagctgcacttggcctcagctggctgtatggaaatgcaccctccctcctgccgctcctctctagaaccttctagaacctgggctgtgctgcttttgagcctcagaccccaggtcagcatctcggttctgcgccacttcctttgtgtttatatggcgttttgtctgtgttgctgtttagagtaaataaactgtttatataaaggttttggttgcattattatcattgaaagtgagaggaggcggcctcccagtgcccggccctccccacccacctgcagccccaccgcgggccaggaccaggctctccatctgcttcggatgcacgcaggctgtgaggctctgtcttgccctggatctttgtaaacagggctgtgtacaaagtgctgctgaggtttctgtgctccccgcatctgcgggctgtagagcgctgggcagctaagatctgcataggtcgggattggcatcgagaccctggcaactgcaccggtgccagctgtcttgggggccacaaggccaggtccagaccagggctgggggctgcctgaggactcctatccgggcagcctgctggcgggggttcccctcttcagtggccaggtcacagggatggagctgcgctgtgcatagggtgccacctcaggtgtctgtcccttgtgtcctcaggaggcagccttgctaccacccgtggcaaacgccaggtgctttttctgggagagcccacagccgtggccctccagggcttccccgacccttagcgccaggtagagggccctgggcagcctgtgtctggaattcttcgtcctgaggccacctgagtgtggtctgtcctggggaggctgtgcgcctcagcagccgtcctgacgctgagccctctgcaaaggttgggccggccaggcctcttggggctgcctgagccactgcaggaagtggcctggctgggaagttgggtgccggtcacctcccagcaggaaggcacagtggacagagatgggaagccctgggggacacagcccggtgctcccagccctccaacctctggctcccaacccagtctccccatcctagcgagcttggccctcctcagtttcgtttcaagccttggggctggagctggccctgctgccctggcaccccccggtggctggagctgggtccccgtggcccaagtgcagggtcccaagagggcagggcggggctccccaaaggagcaaagaatgcagggagggcggtccagggccctgggaaggggagctcggcaccctccaggtccgtgtgggactccagccgctgttggctgggaatcgaagttagaggtgacttccaaaggccccccgagccggcagtgccccccaccacccctccagcgactctgcggtgccagtgccttgttggcttttccggctacgcaccctgcagtcactgagctctcggtctgacgtctgatgtttgtggtttgtttataacacggggccttacctggggaattcagctggtttgaatatttgtagcccgctcccagaatgtcttattttgtaatgactgaactacatttagtaatagttacacatgtatatggttaatacatatggaaattcaatatattttgtagttaacgtattctgaagtaacggatgtttctcgccaatcgtagtgacttcagctaacgaaatgttcttttgtagtaccacggtcctcggcctaacgaaggacgtgaaccttgtaagaggagagctctgaaacgcggtcacctttgtttagtggaagggaaagtgtgttcccggcatgaggtgcctcggaattagtaaagaattgtgggcaatggattaaccactgtatctaagaatccaccattaaagcatttgcacagacaaaaaaaaaaa

SEQ ID NO: 130 - DNA, 2869 bp, Homo sapiens
  ref <308>: DATABASE ACCESSION NUMBER: NCBI / NM_002568
  ref <309>: DATABASE ENTRY DATE: 2011-11-20
  ref <313>: RELEVANT RESIDUES IN SEQ ID NO: (1)..(2869)
cccttctccccggcggttagtgctgagagtgcggagtgtgtgctccgggctcggaacacacatttattattaaaaaatccaaaaaaaatctaaaaaaatcttttaaaaaaccccaaaaaaatttacaaaaaatccgcgtctcccccgccggagacttttattttttttcttcctcttttataaaataacccggtgaagcagccgagaccgacccgcccgcccgcggccccgcagcagctccaagaaggaaccaagagaccgaggccttcccgctgcccggacccgacaccgccaccctcgctccccgccggcagccggcagccagcggcagtggatcgaccccgttctgcggccgttgagtagttttcaattccggttgatttttgtccctctgcgcttgctccccgctcccctccccccggctccggcccccagccccggcactcgctctcctcctctcacggaaaggtcgcggcctgtggccctgcgggcagccgtgccgagatgaaccccagtgcccccagctaccccatggcctcgctctacgtgggggacctccaccccgacgtgaccgaggcgatgctctacgagaagttcagcccggccgggcccatcctctccatccgggtctgcagggacatgatcacccgccgctccttgggctacgcgtatgtgaacttccagcagccggcggacgcggagcgtgctttggacaccatgaattttgatgttataaagggcaagccagtacgcatcatgtggtctcagcgtgatccatcacttcgcaaaagtggagtaggcaacatattcattaaaaatctggacaaatccattgataataaagcactgtatgatacattttctgcttttggtaacatcctttcatgtaaggtggtttgtgatgaaaatggttccaagggctatggatttgtacactttgagacgcaggaagcagctgaaagagctattgaaaaaatgaatggaatgctcctaaatgatcgcaaagtatttgttggacgatttaagtctcgtaaagaacgagaagctgaacttggagctagggcaaaagaattcaccaatgtttacatcaagaattttggagaagacatggatgatgagcgccttaaggatctctttggcaagtttgggcctgccttaagtgtgaaagtaatgactgatgaaagtggaaaatccaaaggatttggatttgtaagctttgaaaggcatgaagatgcacagaaagctgtggatgagatgaacggaaaggagctcaatggaaaacaaatttatgttggtcgagctcagaaaaaggtggaacggcagacggaacttaagcgcaaatttgaacagatgaaacaagataggatcaccagataccagggtgttaatctttatgtgaaaaatcttgatgatggtattgatgatgaacgtctccggaaagagttttctccatttggtacaatcactagtgcaaaggttatgatggagggtggtcgcagcaaagggtttggttttgtatgtttctcctccccagaagaagccactaaagcagttacagaaatgaacggtagaattgtggccacaaagccattgtatgtagctttagctcagcgcaaagaagagcgccaggctcacctcactaaccagtatatgcagagaatggcaagtgtacgagctgttcccaaccctgtaatcaacccctaccagccagcacctccttcaggttacttcatggcagctatcccacagactcagaaccgtgctgcatactatcctcctagccaaattgctcaactaagaccaagtcctcgctggactgctcagggtgccagacctcatccattccaaaatatgcccggtgctatccgcccagctgctcctagaccaccatttagtactatgagaccagcttcttcacaggttccacgagtcatgtcaacacagcgtgttgctaacacatcaacacagacaatgggtccacgtcctgcagctgcagccgctgcagctactcctgctgtccgcaccgttccacagtataaatatgctgcaggagttcgcaatcctcagcaacatcttaatgcacagccacaagttacaatgcaacagcctgctgttcatgtacaaggtcaggaacctttgactgcttccatgttggcatctgcccctcctcaagagcaaaagcaaatgttgggtgaacggctgtttcctcttattcaagccatgcaccctactcttgctggtaaaatcactggcatgttgttggagattgataattcagaacttcttcatatgctcgagtctccagagtcactccgttctaaggttgatgaagctgtagctgtactacaagcccaccaagctaaagaggctgcccagaaagcagttaacagtgccaccggtgttccaactgtttaaaattgatcagggaccatgaaaagaaacttgtgcttcaccgaagaaaaatatctaaacatcgaaaaacttaaatattatggaaaaaaaacattgcaaaatataaaataaataaaaaaaggaaaggaaactttgaaccttatgtaccgagcaaatgccaggtctagcaaacataatgctagtcctagattacttattgatttaaaaacaaaaaaacacaaaaaaatagtaaaatataaaaacaaattaatgttttatagaccctgggaaaaagaattttcagcaaagtacaaaaatttaaagcattcctttctttaattttgtaattctttactgtggaatagctcagaatgtcagttctgttttaagtaacagaattgataactgagcaaggaaacgtaatttggattataaaattcttgctttaataaaaattccttaaacagtgaaaaaaaaa

SEQ ID NO: 131 - DNA, 590 bp, Homo sapiens
  ref <308>: DATABASE ACCESSION NUMBER: NCBI / NM_001487
  ref <309>: DATABASE ENTRY DATE: 2011-12-19
  ref <313>: RELEVANT RESIDUES IN SEQ ID NO: (1)..(590)
acacagcggtcacgtgacatggccccggggagccgaggtgagcgttccagcttccggagccggagggggcccggcgtacccagcccccagcccgacgtgaccatgctgtcccgcctcctaaaagaacaccaggccaagcagaatgaacgcaaggagctgcaggaaaagaggaggcgagaggctatcactgcagcgacctgcctgacagaagctttggtggatcacctcaatgtgggtgtggcccaggcctacatgaaccagagaaagctggaccatgaggtgaagaccctacaggtccaggctgcccaatttgccaagcagacaggccagtggatcggaatggtggagaacttcaaccaggcactcaaggaaattggggatgtggagaactgggctcggagcatcgagctggacatgcgcaccattgccactgcactggaatatgtctacaaagggcagctgcagtctgccccttcctagcccctgttccctcccccaaccctatccctcctacctcacccgcagggggaaggagggaggctgacaagccttgaataaaacacaagcctccgtttctcaaaaaaaaaaaa

SEQ ID NO: 132 - DNA, 839 bp, Homo sapiens
  ref <308>: DATABASE ACCESSION NUMBER: NCBI / NM_001861
  ref <309>: DATABASE ENTRY DATE: 2011-12-04
  ref <313>: RELEVANT RESIDUES IN SEQ ID NO: (1)..(839)
aagcagcccggcccggcattttacgacgttcgcagcgctacccttttccgctccacggtgacctccgtgcggccgggtgcgggcggagtcttcctcgatcccgtggtgctccgcggcgcggccttgctctcttccggtcgcgggacaccgggtgtagagggcggtcgcggcgggcagtggcggcagaatgttggctaccagggtatttagcctagttggcaagcgagcaatttccacctctgtgtgtgtacgagctcatgaaagtgttgtgaagagcgaagacttttcgctcccagcttatatggatcggcgtgaccaccccttgccggaggtggcccatgtcaagcacctgtctgccagccagaaggcattgaaggagaaggagaaggcctcctggagcagcctctccatggatgagaaagtcgagttgtatcgcattaagttcaaggagagctttgctgagatgaacaggggctcgaacgagtggaagacggttgtgggcggtgccatgttcttcatcggtttcaccgcgctcgttatcatgtggcagaagcactatgtgtacggccccctcccgcaaagctttgacaaagagtgggtggccaagcagaccaagaggatgctggacatgaaggtgaaccccatccagggcttagcctccaagtgggactacgaaaagaacgagtggaagaagtgagagatgctggcctgcgcctgcacctgcgcctggctctgtcaccgccatgcaactccatgcctatttactggaaacctgttatgccaaacagttgtaccactgctaataaatgaccagtttacctgaaaaaaaaaaaaaaaaa

SEQ ID NO: 133 - DNA, 1038 bp, Homo sapiens
  ref <308>: DATABASE ACCESSION NUMBER: NCBI / NM_004890
  ref <309>: DATABASE ENTRY DATE: 2011-08-14
  ref <313>: RELEVANT RESIDUES IN SEQ ID NO: (1)..(1038)
aagacgcaccgccccctctcagtcactcccaagatggcggacctactgggctccatcctgagctccatggagaagccacccagcctcggtgaccaggagactcggcgcaaggcccgagaacaggccgcccgcctgaagaaactacaagagcaagagaaacaacagaaagtggagtttcgtaaaaggatggagaaggaggtgtcagatttcattcaagacagtgggcagatcaagaaaaagtttcagccaatgaacaagatcgagaggagcatactacatgatgtggtggaagtggctggcctgacatccttctcctttggggaagatgatgactgtcgctatgtcatgatcttcaaaaaggagtttgcaccctcagatgaagagctagactcttaccgtcgtggagaggaatgggacccccagaaggctgaggagaagcggaagctgaaggagctggcccagaggcaagaggaggaggcagcccagcaggggcctgtggtggtgagccctgccagcgactacaaggacaagtacagccacctcatcggcaagggagcagccaaagacgcagcccacatgctacaggccaataagacctacggctgtgtgcccgtggccaataagagggacacacgctccattgaagaggctatgaatgagatcagagccaagaagcgtctgcggcagagtggggaagagttgccgccaacctcctaggcgccccgcccagctccctttgacccctggggcagggcagggggcagggagagacaaggctgctgctattagagcccatcctggagccccacctctgaaccacctcctaccagctgtccctcaggctgggggaaaacaggtgtttgatttgtcaccgttggagcttggatatgtgcgtggcatgtgtgtgtgtgtgtgagagtgtgaatgcacaggtgggtatttaatctgtattattccccgttcttggaattttcttccccatggggctggggtactttacattcaataaatactgtttaacccaaaaaaaaaaaaaaa

SEQ ID NO: 134 - DNA, 1556 bp, Homo sapiens
  ref <308>: DATABASE ACCESSION NUMBER: NCBI / NM_002812
  ref <309>: DATABASE ENTRY DATE: 2011-11-26
  ref <313>: RELEVANT RESIDUES IN SEQ ID NO: (1)..(1556)
ccaacttccggtcaccatcttgagtgacgacagaggcggagctccaactgacatgttcattaagggcagggctccgagggcgccacctcgagagcgacggcgggctacccggggcgggctgaggcaggttgtagccccgccccgggccttgggctccacctctcggccccacttccgccgggcaagcgtttgtaggcggcgctgccgtaaatcaggcggtctgcttgccgcatcacgcaagatggcggccgcggcggtgaacggggcggcaggcttctcgagctccgggcccgcggcaacctcgggcgctgttctgcaggccgcgaccggcatgtacgagcaactcaagggcgagtggaaccgtaaaagccccaatcttagcaagtgcggggaagagctgggtcgactcaagctagttcttctggagctcaacttcttgccaaccacagggaccaagctgaccaaacagcagctaattctggcccgtgacatactggagatcggggcccaatggagcatcctacgcaaggacatcccctccttcgagcgctacatggcccagctcaaatgctactactttgattacaaggagcagctccccgagtcagcctatatgcaccagctcttgggcctcaacctcctcttcctgctgtcccagaaccgggtggctgagttccacacggagttggagcggctgcctgccaaggacatacagaccaatgtctacatcaagcacccagtgtccctggagcaatacctgatggagggcagctacaacaaagtgttcctggccaagggtaacatccccgccgagagctacaccttcttcattgacatcctgctcgacactatcagggatgagatcgctgggtgcatcgagaaggcctacgagaaaatccttttcactgaggccacccggatcctcttcttcaacacacccaaaaagatgacagactacgccaagaagcgagggtgggtcctgggccccaacaactactacagttttgccagccagcagcagaagccggaagacaccaccattccctccacagaactggccaaacaggtcatcgagtatgcccggcagctggagatgatcgtctgagccccccgggcactgggtggggcagggcacgagttatttaaaacagttacactgcagggtttcgcccaataaaggtggactgacattccctcttccaggcccttgtctccccagttgggacggcagagagacaagttcttatatctgaagaacttggaggttttggggcattcaggagttggagatagcctccaactgggtcagcctctgtctggtgggcattgctcagggtctcaaacatggacgcccactgtggggccccagcagcactgtggcctgcaggagggcatggccccaggtagggggactgttctagccagctgtggacacataggaatgctggaccagggtaccagattttttcaacaaagggggtgaagtgtcctactaaaaagaataaatgttggcagtgaattaaacaatttttcaaatgaaaaaaaaaaaaaaaaaa

SEQ ID NO: 135 - DNA, 3887 bp, Homo sapiens
  ref <308>: DATABASE ACCESSION NUMBER: NCBI / NM_004926
  ref <309>: DATABASE ENTRY DATE: 2011-12-04
  ref <313>: RELEVANT RESIDUES IN SEQ ID NO: (1)..(3887)
gagagcgccggctgcaaagcgagcgcgagtgtcgacgcgtgcggcgcactaaattgtgccgcgctcgcccccgccagaccatgtcctcctggggaaaaagtttccctagtccccccagcagcgcgccccaccctacgccccgctggaaaaaaaacagcaacataaaatcctaggcttgaacattctgtgcgtcccaaatttctaatgtcctcggcctgcccggtttgccgaagggagccgagtgtcgaagagaagtcgggaaaaggtaagttgtgcagacacttggggaagtttcaaggagaccgccagctcaagatggaaaccgcggcccgggcgctaaggacgggcttcagctcccgctggcaaaaagagaaagtcgagcccgccttcctgcccaacaaaaaacaacaacatgacaacaagaaccccggagggagtggaatgagtgacgtcacagccgcgctctgaggctgacaaaggagggggcgcgcccctcccgctctgcgcccgcgcggccccggagagggggcgcctgaagcgccgggtagggaagtcagccgacttgaaacttttcctcttaaagaaaaaaaaaaaaaagttgtgcgcggctcacagtggggttttttttttccgccttcttttctcgtctcccctcccccttcttccttttgaaagtttcttctcctccccctgccccccctccccgcctgaccgcatggctgattcaactccagtgtcaatcaacttctttttcctcctcttcctcatttaaataagtttaaagctcctcctccccccggcccaccaaatctgaactttataaattgggctttgcgcgccccagcccggagtcagaaaggcgaggggcgccgggaactggcgtgtgggactccagacaggagaggctgcgccttccccgcaccgggaccttcgcgacacaccagatcctcgcccctggctcgcgcgaacgcacaggatgaccaccaccctcgtgtctgccaccatcttcgacttgagcgaagttttatgcaagggtaacaagatgctcaactatagtgctcccagtgcagggggttgcctgctggacagaaaggcagtgggcacccctgctggtgggggcttccctcggaggcactcagtcaccctgcccagctccaagttccaccagaaccagctcctcagcagcctcaagggtgagccagcccccgctctgagctcgcgagacagccgcttccgagaccgctccttctcggaagggggcgagcggctgctgcccacccagaagcagcccgggggcggccaggtcaactccagccgctacaagacggagctgtgccgcccctttgaggaaaacggtgcctgtaagtacggggacaagtgccagttcgcacacggcatccacgagctccgcagcctgacccgccaccccaagtacaagacggagctgtgccgcaccttccacaccatcggcttttgcccctacgggccccgctgccacttcatccacaacgctgaagagcgccgtgccctggccggggcccgggacctctccgctgaccgtccccgcctccagcatagctttagctttgctgggtttcccagtgccgctgccaccgccgctgccaccgggctgctggacagccccacgtccatcaccccaccccctattctgagcgccgatgacctcctgggctcacctaccctgcccgatggcaccaataacccttttgccttctccagccaggagctggcaagcctctttgcccctagcatggggctgcccgggggtggctccccgaccaccttcctcttccggcccatgtccgagtcccctcacatgtttgactctccccccagccctcaggattctctctcggaccaggagggctacctgagcagctccagcagcagccacagtggctcagactccccgaccttggacaactcaagacgcctgcccatcttcagcagactttccatctcagatgactaagccagggtagggagggacctcctgcctactccagcccctaccctgcacccacatcccataccctcttctccctacccatcccattccccacaggccctacattaacaaggttaagctcaacccctttcccccagcacctcagaatgtgccctccctctccccctcataaccccacctaacataaggacaagtcaatttgtcagtagcttcttctggcttgaaaccccctccctggattttatagcccacttaccatgcataacagacaagtcccatattttgtcagtagatgcctttttttttccggcttaagccttaagtgccaaatcacaagagaaaaagcagtaacagtttacagaagcaacttagtgccttgtaatctaactttgtcactgtgactacattacctcttcagcgccagagggcacccgtgggcctcccggagcctctgcccatggcggggtggagacccggaaccagcagccccctccactggcgacacaactgcaccttccctcatttcagtctcccgcacacttattcctcctcccctcttcccggtggcacctctccacctgtacccgcccccccaccccccccacccctgccccttggaagagttgttgccagaccagggttttgggggaaacctgtcttgacattcaaaacctttttcttcccgatctgaacccctgttgactaatcttgcctgggtttgtgtaggtctgcaggaaggaaggctgaaaaagcggacgaagattttgacttaagtgggactttgtgatttaattttttcttttttttaagtggggaggaaggggaagctagatggactaggagagacttgattttggtgctaaagttccccagttcatatgtgacatctttttaaaaaaaataacaacaaaaaaaaaatgagagaaaagctaaaaaaaaaaaagtaaggggtgagcagttaatggtattcattccacatacaatatctgtgtaaaacgatttcctgtagaagtagctttaatggtttttgctctagaataccgtaggtctatccttagagcactcacgccatgctttcttccctgggttttaaacttcatataactttcagaaattggagagcaaaaattttgcttgtcactgcacatcaatataaaaaagcttatttaacttatcaaaacgtatttattgccaaactatgcttttttttgttaattttgttcatatttatcgggatgacaaatccatagaatatattcttttatgttaaattatgatcttcatattaatcttaaaattttgtgacgtgtctttttcctttttttccacagttttaatatattattcttcaacgacattttttgtaactttacacttttttggttattttattttaaaaaaatgaaaaattaatttaaaaaaatgcaaaaaactgttggattatttattttagaaattcccccctttgtgttggactgcaaattgagtttctttctctttaggcctttcacaactaggactgagaatgtatgtaaaagttctgtgacagtacagaaggaaaacaactttttatgtatagcttctaaaaggggaaaaaaaaaaaaagagaaaccctttgacttccacgtgcccatctcaagacattccactcacagatttgaggttctggattccaggtctggagttttccaatgttaatgtaaacagaactggcacacacacattaagatgaatgtaattattattcctcttgctggtcactaccgtcgctttctatttctctttctttgtgtgaatttatttaaaagaaaaaaaaactttttgtaacgactatttgcagtttaaaaatcaataaaccccgttttttcaagaaacattgataaaaaaaaaaaaaaaa

SEQ ID NO: 136 - DNA, 2062 bp, Homo sapiens
  ref <308>: DATABASE ACCESSION NUMBER: NCBI / NM_002539
  ref <309>: DATABASE ENTRY DATE: 2011-11-20
  ref <313>: RELEVANT RESIDUES IN SEQ ID NO: (1)..(2062)
gtcagtccctcctgtagccgccgccgccgccgcccgccgcccctctgccagcagctccggcgccacctcgggccggcgtctccggcgggcgggagccaggcgctgacgggcgcggcgggggcggccgagcgctcctgcggctgcgactcaggctccggcgtctgcgcttccccatggggctggcctgcggcgcctgggcgctctgagattgtcactgctgttccaagggcacacgcagagggatttggaattcctggagagttgcctttgtgagaagctggaaatatttctttcaattccatctcttagttttccataggaacatcaagaaatcatgaacaactttggtaatgaagagtttgactgccacttcctcgatgaaggttttactgccaaggacattctggaccagaaaattaatgaagtttcttcttctgatgataaggatgccttctatgtggcagacctgggagacattctaaagaaacatctgaggtggttaaaagctctccctcgtgtcacccccttttatgcagtcaaatgtaatgatagcaaagccatcgtgaagacccttgctgctaccgggacaggatttgactgtgctagcaagactgaaatacagttggtgcagagtctgggggtgcctccagagaggattatctatgcaaatccttgtaaacaagtatctcaaattaagtatgctgctaataatggagtccagatgatgacttttgatagtgaagttgagttgatgaaagttgccagagcacatcccaaagcaaagttggttttgcggattgccactgatgattccaaagcagtctgtcgtctcagtgtgaaattcggtgccacgctcagaaccagcaggctccttttggaacgggcgaaagagctaaatatcgatgttgttggtgtcagcttccatgtaggaagcggctgtaccgatcctgagaccttcgtgcaggcaatctctgatgcccgctgtgtttttgacatgggggctgaggttggtttcagcatgtatctgcttgatattggcggtggctttcctggatctgaggatgtgaaacttaaatttgaagagatcaccggcgtaatcaacccagcgttggacaaatactttccgtcagactctggagtgagaatcatagctgagcccggcagatactatgttgcatcagctttcacgcttgcagttaatatcattgccaagaaaattgtattaaaggaacagacgggctctgatgacgaagatgagtcgagtgagcagacctttatgtattatgtgaatgatggcgtctatggatcatttaattgcatactctatgaccacgcacatgtaaagccccttctgcaaaagagacctaaaccagatgagaagtattattcatccagcatatggggaccaacatgtgatggcctcgatcggattgttgagcgctgtgacctgcctgaaatgcatgtgggtgattggatgctctttgaaaacatgggcgcttacactgttgctgctgcctctacgttcaatggcttccagaggccgacgatctactatgtgatgtcagggcctgcgtggcaactcatgcagcaattccagaaccccgacttcccacccgaagtagaggaacaggatgccagcaccctgcctgtgtcttgtgcctgggagagtgggatgaaacgccacagagcagcctgtgcttcggctagtattaatgtgtagatagcactctggtagctgttaactgcaagtttagcttgaattaagggatttggggggaccatgtaacttaattactgctagttttgaaatgtctttgtaagagtagggtcgccatgatgcagccatatggaagactaggatatgggtcacacttatctgtgttcctatggaaactatttgaatatttgttttatatggatttttattcactcttcagacacgctactcaagagtgcccctcagctgctgaacaagcatttgtagcttgtacaatggcagaatgggccaaaagcttagtgttgtgacctgtttttaaaataaagtatcttgaaataattaggc

SEQ ID NO: 137 - DNA, 648 bp, Homo sapiens
  ref <308>: DATABASE ACCESSION NUMBER: NCBI / NM_000979
  ref <309>: DATABASE ENTRY DATE: 2011-11-19
  ref <313>: RELEVANT RESIDUES IN SEQ ID NO: (1)..(648)
ctttccggacctggccgagcaggaggcgccatcatgggagtggacatccgccataacaaggaccgaaaggttcggcgcaaggagcccaagagccaggatatctacctgaggctgttggtcaagttatacaggtttctggccagaagaaccaactccacattcaaccaggttgtgttgaagaggttgtttatgagtcgcaccaaccggccgcctctgtccctttcccggatgatccggaagatgaagcttcctggccgggaaaacaagacggccgtggttgtggggaccataactgatgatgtgcgggttcaggaggtacccaaactgaaggtatgtgcactgcgcgtgaccagccgggcccgcagccgcatcctcagggcagggggcaagatcctcactttcgaccagctggccctggactcccctaagggctgtggcactgtcctgctctccggtcctcgcaagggccgagaggtgtaccggcatttcggcaaggccccaggaaccccgcacagccacaccaaaccctacgtccgctccaagggccggaagttcgagcgtgccagaggccgacgggccagccgaggctacaaaaactaaccctggatcctactctcttattaaaaagatttttgctgacaaaaaaaa

SEQ ID NO: 138 - DNA, 4499 bp, Homo sapiens
  ref <308>: DATABASE ACCESSION NUMBER: NCBI / NM_000977
  ref <309>: DATABASE ENTRY DATE: 2011-12-04
  ref <313>: RELEVANT RESIDUES IN SEQ ID NO: (1)..(4499)
ccagagtgcattgcggggccgcttcctttccgctcggctgttttcctgcgcaggagccgcagggccgtaggcagccatggcgcccagccggaatggcatggtcttgaagccccacttccacaaggactggcagcggcgcgtggccacgtggttcaaccagccggcccgtaagatccgcagacgtaaggcccggcaagccaaggcgcgccgcatcgccccgcgccccgcgtcgggtcccatccggcccatcgtgcgctgccccacggttcggtaccacacgaaggtgcgcgccggccgcggcttcagcctggaggagctcagggtggccggcattcacaagaaggtggcccggaccatcggcatttctgtggatccgaggaggcggaacaagtccacggagtccctgcaggccaacgtgcagcggctgaaggagtaccgctccaaactcatcctcttccccaggaagccctcggcccccaagaagggagacagttctgctgaagaactgaaactggccacccagctgaccggaccggtcatgcccgtccggaacgtctataagaaggagaaagctcgagtcatcactgaggaagagaagaatttcaaagccttcgctagtctccgtatggcccgtgccaacgcccggctcttcggcatacgggcaaaaagagccaaggaagccgcagaacaggatgttgaaaagaaaaaataaagccctcctggggacttggaatcagtcggcagtcatgctgggtctccacgtggtgtgtttcgtgggaacaactgggcctgggatggggcttcactgctgtgacttcctcctgccaggggatttggggctttcttgaaagacagtccaagccctggataatgctttactttctgtgttgaagcactgttggttgtttggttagtgactgatgtaaaacggttttcttgtggggaggttacagaggctgacttcagagtggacttgtgttttttctttttaaagaggcaaggttgggctggtgctcacagctgtaatcccagcactttgaggttggctgggagttcaagaccagcctggccaacatgtcagaactactaaaaataaagaaatcagccatgcttggtgctgcacacttgtagttgcagctcctgggaggcagaggtgagggatcacttaacccaggaggcagaggctgcactgagccaggatcacgccactgcactctagcctgggcaacagtgagactgtctcaaaaaaaaaaaaagagacagggtcttcggcacccaggctggagtacagtgccacaatcatggctcactgcagtcttgaactcatggcctcaagcagtcctccctcagcctcccaagtagaggggtttataggcacgagaccctgcacccaacctagagttgccttttttaagcaaagcagtttctagttaatgtagcatcttggactttggggcgtcattcttaagcttgttgtgcccggtaaccatggtcctcttgctctgattaacccttccttcaatgggcttcttcacccagacaccaaggtatgagatggccctgccaagtgtcggcctctcctgttaaacaaaaacattctaaagccattgttcttgcttcatggacaagaggcagccagagagagtgccagggtgccctggtctgagctggcatccccatgtcttctgtgtccgagggcagcatggtttctcgtgcagtgctcagacacagcctgccctagtcctaccagctcacagcagcacctgctctccttggcagctatggccatgacaaccccagagaagcagcttcagggaccgagtcagattctgttttgtctacatgcctctgccgggtgccggtattgaggcacccagggagctgttactggcgtggaaataggtgatgctgctacctctgctgctgcactcacagccacacttgatacacgatgacaccttgcttgtttggaaacatctaaacatctagtagatgacttgcaggctgttggctaccagtttcctgtctgaggtgtatatgttaacttcgtgatcagtttgtatgtttgggactcttgtcctatgtaaagttaaggtgggccgggtgcagtggctcacgcctgtaatcctaacactgggaggccgaggcgggtggatcacctgatggtgaaacctcatctctactgaaaatacaaaaattagctgagtggtgacacacgcctgtaatcccagctacttggtaggcttgaacccaggaggcagagattgcagtgagccgagctgcaccactgtgctccagcctgggtgacagcgagactcagtctcaaaaaaagttgtacaaggtggatggttggaagcttgagcctaggctcgaatccctctcacgtgagagggcctgaagatttctggtggattccaacctggctgaagactggccgtggggggtgcaggggtctccagcgctctgccctccagcctgcttcctccctgcccacaccgcactaggggaagggcctttcctgctgcctgcggggccgcacctggagtaggtaatgccatgtggtgacgtgaatggagcagaggtctgtgccccatcacaccgccttgctgtttttactgtgggacaaaagcactctgatctgcgtgttccgggggccctcctaccagccgacttgacgggaagtcagggttcaggtatcatctgtgcacctggggcggggtagtctgcactgaacctgccagagtcccctcctcatttcactgaaagtcacagtctccagggctgtgttgctaaccttacgttctctccgtttgcttaatctattaagagccctaacaggagaggatgggctttctctgttgtctggggccctgctgttggccggtgctcttagcaagaggtcatttttctaggttgcgctgggacattgtgagtttggtgagggtcatggatgtgggctgggctgggctgggctgggccgggctgcctgctgcctgctgctcccctacctgaaatgcagctagtgcggctctgcccttcctggggctgaggaaggcttctgcaggatagctggggggctgggcaggtgggtgaggcagcctccctgctgacactcagtccttgtagctggagcaagatctcctgatccaggtacgggcctgtctgctccaagaaagactctgccaccagatgcaaaggggccctttgttttaacttagtccctggggaccgcctgattcagcacctgtcggcccaggataccccgctggtggggacaagtgcctgagtgtgggccgtgcccgagtgtggccatccctgagtggggccgtcctgactaggaagtggcttttcagttgtgatgtgtgggcctgacctagggggcgctgtggaacccgggctggaaccagccctctgtgccaggccgcagacaggttccgccggccctgaggggcagctgccatggcgtgggtcactgggagctgagaggaagggcccccaccgcacctcaggcaaagcggctctgggaacaccttgatttcgtccatgtgagccgtcccagggagggcagccaagctgtgaagcctgagaaactgacctgtgtgccacgagcttgtggtctgctgcccggtggaggaagtgcaggtgcgcccaggctcctcattccgttttgcaggattccttcggggtgtgagcatttcctattcagcctgtcgcccccggggagcacgggctggctctgtggtgcccgtggccttttgtagaagcgttggttttacggcaggttcatctctggggcagcctcccacagtgggtggggctttgccagcagtgcccacgggggtcatggggccaggcgcgctccggcgcctgcagaactgatcggggatagtctcaggaggcgctagtcacgtgccccggtgatcggggatagtctcagaaggcgctagtctcctgccccggtgatcggggatagtctcaggaggcacgagtcgcctgcctcggtgatgcaccgtttctcacaccggctgctctggcccgagctaaaggggaagacgtgtgcggataggagctgcacacaattttcctccatgtattgtttattttgctttttcttttggctagacattaggaatttcagttttcccaagttgtatttttccttttctattttaaaattatcatgcagggctgggtgaggtcgctcacgcctatagtctcaaaactttgggaggctgaggggggaggatggcatgagcccaggagtttaaggctgcagtgagccgagatcgctccactgtcctccagcctgcatgacagagcgagaccctatctcaggaaaaaaaaaaacaaaactattatgcagtagtttcgaccctggaagacgagtgtgcatctttgagttgtaacacgtgtacctcgcccatccaggcgtagtttcatttggaatctggttatcctgtagttgctttgttaaaaatatatgtaattgcaaatcattt

SEQ ID NO: 139 - DNA, 641 bp, Homo sapiens
  ref <308>: DATABASE ACCESSION NUMBER: NCBI / NM_001015
  ref <309>: DATABASE ENTRY DATE: 2011-11-20
  ref <313>: RELEVANT RESIDUES IN SEQ ID NO: (1)..(641)
acttcctctccagcccctgcgtaatcgataaggaaacccggacgctgctgcccctttctttttttcaggcggccgggaagatggcggacattcagactgagcgtgcctaccaaaagcagccgaccatctttcaaaacaagaagagggtcctgctgggagaaactggcaaggagaagctcccgcggtactacaagaacatcggtctgggcttcaagacacccaaggaggctattgagggcacctacattgacaagaaatgccccttcactggtaatgtgtccattcgagggcggatcctctctggcgtggtgaccaagatgaagatgcagaggaccattgtcatccgccgagactatctgcactacatccgcaagtacaaccgcttcgagaagcgccacaagaacatgtctgtacacctgtccccctgcttcagggacgtccagatcggtgacatcgtcacagtgggcgagtgccggcctctgagcaagacagtgcgcttcaacgtgctcaaggtcaccaaggctgccggcaccaagaagcagttccagaagttctgaggctggacatcggcccgctccccacaatgaaataaagttattttctcattccaaaaaaaaaaaaaaaaaaaaaaaaaaaaaaaa

SEQ ID NO: 140 - DNA, 2095 bp, Homo sapiens
  ref <308>: DATABASE ACCESSION NUMBER: NCBI / NM_001760
  ref <309>: DATABASE ENTRY DATE: 2011-12-18
  ref <313>: RELEVANT RESIDUES IN SEQ ID NO: (1)..(2095)
gcgcctgtcagggaagcggcgcgcgcgcgcgggcggcgggcgggctggggatccgccgcgcagtgccagcgccagcgccagacccgcgccccgcgctctccggcccgtcgcctgccttgggactcgcgagcccgcactcccgccctgcctgttcgctgcccgagtatggagctgctgtgttgcgaaggcacccggcacgcgccccgggccgggccggacccgcggctgctgggggaccagcgtgtcctgcagagcctgctccgcctggaggagcgctacgtaccccgcgcctcctacttccagtgcgtgcagcgggagatcaagccgcacatgcggaagatgctggcttactggatgctggaggtatgtgaggagcagcgctgtgaggaggaagtcttccccctggccatgaactacctggatcgctacctgtcttgcgtccccacccgaaaggcgcagttgcagctcctgggtgcggtctgcatgctgctggcctccaagctgcgcgagaccacgcccctgaccatcgaaaaactgtgcatctacaccgaccacgctgtctctccccgccagttgcgggactgggaggtgctggtcctagggaagctcaagtgggacctggctgctgtgattgcacatgatttcctggccttcattctgcaccggctctctctgccccgtgaccgacaggccttggtcaaaaagcatgcccagacctttttggccctctgtgctacagattatacctttgccatgtacccgccatccatgatcgccacgggcagcattggggctgcagtgcaaggcctgggtgcctgctccatgtccggggatgagctcacagagctgctggcagggatcactggcactgaagtggactgcctgcgggcctgtcaggagcagatcgaagctgcactcagggagagcctcagggaagcctctcagaccagctccagcccagcgcccaaagccccccggggctccagcagccaagggcccagccagaccagcactcctacagatgtcacagccatacacctgtagccctggagaggccctctggagtggccactaagcagaggaggggccgctgccacccacctccctgcctccaggaaccacaccacatctaagcctgaaggggcgtctgttcccccttcacaaagcccaagggatctggtcctacccatccccgcagtgtgcactaaggggcccggccagccatgtctgcatttcggtggctagtcaagctcctcctccctgcatctgaccagcagcgcctttcccaactctagctgggggtgggccaggctgatgggacagaattggatacatacaccagcattccttttgaacgcccccccccacccctgggggctctcatgttttcaactgccaaaatgctctagtgccttctaaaggtgttgtcccttctagggttattgcatttggattggggtccctctaaaatttaatgcatgatagacacatatgagggggaatagtctagatggctcctctcagtactttggaggcccctatgtagtccgtgctgacagctgctcctagagggaggggcctaggcctcagccagagaagctataaattcctctttgctttgctttctgctcagcttctcctgtgtgattgacagctttgctgctgaaggctcattttaatttattaattgctttgagcacaactttaagaggacataatggggtcctggccatcccacaagtggtggtaaccctggtggttgctgttttcctcccttctgctactggcaaaaggatctttgtggccaaggagctgctatagcctggggtggggtcatgccctcctctcccattgtccctctgccccatcctccagcagggaaaatgcagcagggatgccctggaggtggctgagcccctgtctagagagggaggcaagccctgttgacacaggtctttcctaaggctgcaaggtttaggctggtggcccaggaccatcatcctactgtaataaagatgattgtgaaataaaactggctttggcttcttggaaaaaaaaaaaaaaaaaaaaaaaaaaaaaaaaaaaaaaaaaaaaa

SEQ ID NO: 141 - DNA, 854 bp, Homo sapiens
  ref <308>: DATABASE ACCESSION NUMBER: NCBI / NM_003973
  ref <309>: DATABASE ENTRY DATE: 2011-11-28
  ref <313>: RELEVANT RESIDUES IN SEQ ID NO: (1)..(854)
acatgcgcagggttgggcgggtcttcttccttctcgcctaacgccgccaacatggtgttcaggcgcttcgtggaggttggccgggtggcctatgtctcctttggacctcatgccggaaaattggtcgcgattgtagatgttattgatcagaacagggctttggtcgatggaccttgcactcaagtgaggagacaggccatgcctttcaagtgcatgcagctcactgatttcatcctcaagtttccgcacagtgcccaccagaagtatgtccgacaagcctggcagaaggcagacatcaatacaaaatgggcagccacacgatgggccaagaagattgaagccagagaaaggaaagccaagatgacagattttgatcgttttaaagttatgaaggcaaagaaaatgaggaacagaataatcaagaatgaagttaagaagcttcaaaaggcagctctcctgaaagcttctcccaaaaaagcacctggtactaagggtactgctgctgctgctgctgctgctgctgctgctaaagttccagcaaaaaagatcaccgccgcgagtaaaaaggctccagcccagaaggttcctgcccagaaagccacaggccagaaagcagcgcctgctccaaaagctcagaagggtcaaaaagctccagcccagaaagcacctgctccaaaggcatctggcaagaaagcataagtggcaatcataaaaagtaataaaggttctttttgacctgttgacaaatgtatttaagcctttggatttaaagcctgttgaggctggagttaggaggcagattgatagtaggattataataaacattaaataatcaaaaaaaaaaaaaaaaaaaa

SEQ ID NO: 142 - DNA, 1598 bp, Homo sapiens
  ref <308>: DATABASE ACCESSION NUMBER: NCBI / NM_002815
  ref <309>: DATABASE ENTRY DATE: 2011-11-20
  ref <313>: RELEVANT RESIDUES IN SEQ ID NO: (1)..(1598)
cgtcggcggccgcggccggggacggtgtgagagcggtaagatggcggcggcggcggtggtggagttccagagagcccagtctctactcagcaccgaccgggaggcctccatcgacatcctccactccatcgtgaagcgtgacattcaggaaaacgatgaagaggcagtgcaagtcaaagagcagagcatcctggaactgggatctctcctggcaaagactggacaagctgcagagcttggaggactcctgaagtatgtacgacccttcttgaattccatcagcaaggctaaagcagctcgcctggtccgatctcttcttgatctgtttcttgatatggaagcagctacagggcaggaggtcgagctgtgtttagagtgcatcgaatgggccaagtcagagaaaagaactttcttacgccaagctttggaggcaagactggtgtctttgtactttgataccaagaggtaccaggaagcattgcatttgggttctcagctgctgcgggagttgaaaaagatggacgacaaagctcttttggtggaagtacagcttttagaaagcaaaacataccatgccctgagcaacctgccgaaagcccgagctgccttaacttctgctcgaaccacagcaaatgccatctactgcccccctaaattgcaggccaccttggacatgcagtcgggtattatccatgcagcagaagagaaggactggaaaactgcgtactcatacttctatgaggcatttgagggttatgactccatcgacagccccaaggccatcacatctctgaagtacatgttgctgtgcaaaatcatgctcaacaccccagaagatgtccaggctttggtgagcgggaagcttgcacttcggtatgcagggaggcagacagaagcattaaaatgcgtggctcaggctagcaagaacagatcactggcagattttgaaaaggctctgacagattaccgggcagagctccgggatgacccaatcatcagcacacacttggccaagttgtatgataacttactagaacagaatctgatccgagtcattgagcctttttccagagtacagattgaacacatatctagtctcatcaaactctccaaggccgacgtggaaaggaaattatcacagatgattcttgacaagaaatttcatgggattttggaccagggggagggtgtcctgattattttcgatgaacccccagtagataaaacttacgaagctgctctggaaacaattcagaacatgagcaaagtagtggattccctctacaacaaagccaagaaactgacatagagttggatctgtagcggtcctttggagagtgtgtgtggcgggagagtgaaaccttgggggaaaatgctaggagattcttttttctttttgttctacttttcgctcggaaagtttttaaatcctcatttggtgcatctgtattccagccaataggtgtgccagttttcatgtaatctttactggcccaacttgggagtggggaaattgcttaaaaaaaaagaaaaagaaaaaaaaaaagattattctaaataaaaggaaaaaggcttacactaaaaaaaaaaaaaaaaaa

SEQ ID NO: 143 - DNA, 3258 bp, Homo sapiens
  ref <308>: DATABASE ACCESSION NUMBER: NCBI / NM_000367
  ref <309>: DATABASE ENTRY DATE: 2011-12-17
  ref <313>: RELEVANT RESIDUES IN SEQ ID NO: (1)..(3258)
gcgggcggaggcggggcgcggagaagtggcggaggtggaagcggaggcgtacccgcccctggggacgtcattggtggcggaggcaatggccggcaaccagctgtaagcgaggcacggaagacatatgcttgtgagacaaaggtgtctctgaaactatggatggtacaagaacttcacttgacattgaagagtactcggatactgaggtacagaaaaaccaagtactaactctggaagaatggcaagacaagtgggtgaacggcaagactgcttttcatcaggaacaaggacatcagctattaaagaagcatttagatactttccttaaaggcaagagtggactgagggtattttttcctctttgcggaaaagcggttgagatgaaatggtttgcagaccggggacacagtgtagttggtgtggaaatcagtgaacttgggatacaagaattttttacagagcagaatctttcttactcagaagaaccaatcaccgaaattcctggaaccaaagtatttaagagttcttcggggaacatttcattgtactgttgcagtatttttgatcttcccaggacaaatattggcaaatttgacatgatttgggatagaggagcattagttgccatcaatccaggtgatcgcaaatgctatgcagatacaatgttttccctcctgggaaagaagtttcagtatctcctgtgtgttctttcttatgatccaactaaacatccaggtccaccattttatgttccacatgctgaaattgaaaggttgtttggtaaaatatgcaatatacgttgtcttgagaaggttgatgcttttgaagaacgacataaaagttggggaattgactgtctttttgaaaagttatatctacttacagaaaagtaaatgagacatagataaaataaaatcacactgacatgtttttgaggaattgaaaattatgctaaagcctgaaaatgtaatggatgaatttttaaaattgtttataaatcatatgatagatctttactaaaaatggctttttagtaaagccatttactttttctaaaaaagttttagaagaaaaagatgtaactaaacttttaaagtagctcctttggagaggagattatgatgtgaaagattatgcctatgtgtcttgcagattgcaagatattttaccaatcagcatgtgttacctgtacaattaaaaaaatatttcaaaatgcaatgcatattaaatataatacacacagaaaaactggcatttattttgttttatttttttgagatggagtttcgttcttgttgcccaacctggagtgcaatggtgcaatctcagctcactgcaacctctgcctcccaggttcaggtgattctcctgcctcagcctcctgagtagctgggattacaggtgtgcgccaccacgcccagctaattttttgtatttttagtagagacagggtttcaccatgttggtcaggctgatctcgagctcctgacctcaggtgatctacccacctcggcctcccaaagtgctgggattacaggcgtgagccactgcacctggcctgacattctttatgaaatttagaattgttgaagaactataacatttcagtagggttcaaggtggtcccaaaagttatataaaagattagtttttactataaacccttgtcttttactcagatcctagcatcccttttcacatggtttctccatgtatataacagaatcaagaaacaaattttaattaaacaatctgtaacagaatcaagaaacaaatacattttaattaaacaatctatatggaacaaacattcccaaattctaagaataaatttttctttaagttttctctgagtttggcaattgttgttttttataatttaatctgtttaaatcatcaggtcttataaaatataatgtacttagagctggattcatggctgtttattatgaaaggttagatttctcagttcttctttaaccacattttgttatatcagacagtcctctataactctgtactacccaacaactaaatggtttagattgtttagctcatgttaataggatggttgtgtattataaaaaacgagttacgtgtgtgtgtgcacgcatgcacgcacatgtgctggcttaaaggttgttaatgcaaggtttggggtcccctttaacactggtgaaagctacggtactctccccagagatatgtcttgtcagcctctctagttccccttggcctgcatgtacaaacttctaccctagaagctctctgccatcgatgtattctaatagatttgtaaggctattaatttgaagcaactccttgctcacagtgattcttgcttctctgagacctgctcccagtcgatactgtgggcttcagaagccatgactccccaactctgcctgtatcaccggttgaatggacaactaacccgagctggaccaacacaattctctccagagacttttgattttacttttatgtagagacagggtctcactttgttgcccacgctgatgttgaacttgacgtgaggcctcaagcagtcctcctgtcttggccacccaaagtgctaggattacaggtatgagccattgcgctggccctcttcataggcttttggacttgggaatagaaaagcaaccccgtctctactaaaaatacaaaaaaattagccaggcgtggtggcacgtgcctgtaatcccagctacttgggaggctgaggcaggagaatcacttgaacctaggaggcggaggttgcagtgagctgagatcatgccactgcacgcaagcctgggcaacagagcaagactctgtctcaaaagaaagaaaaagaaaagaaaaaaaagaaaggcaagttgactgctgaaaggggaatctgtgtacgcctgggagctgtggggcagccacattccagcacatggatctgagaaacagaacgctgatctgcagaaagagatgagaaccaaagagaggccacctgcgtcctgggtccattttcatcctccctgaagcccagctgcccagggtggggagaaacaccctgtgtccatgggatagagtcctttccgcttgcagttgtgcccaaagaatcttaaatacaaatgagatatccttaggtagttgatcatttatgtaatatgtgtcttcactggggaatactgacttcctaaaatctcaagatggaagatataccacatgtaaattattttagagcaattaaattgttttcaggattttccaaaaaaaaaaaaa

SEQ ID NO: 144 - DNA, 903 bp, Homo sapiens
  ref <308>: DATABASE ACCESSION NUMBER: NCBI / NM_000973
  ref <309>: DATABASE ENTRY DATE: 2011-11-19
  ref <313>: RELEVANT RESIDUES IN SEQ ID NO: (1)..(903)
agataaggccgctcgctgacgccgtgtttcctctttcggccgcgctggtgaacaggacccgtcgccatgggccgtgtgatccgtggacagaggaagggcgccgggtctgtgttccgcgcgcacgtgaagcaccgtaaaggcgctgcgcgcctgcgcgccgtggatttcgctgagcggcacggctacatcaagggcatcgtcaaggacatcatccacgacccgggccgcggcgcgcccctcgccaaggtggtcttccgggatccgtatcggtttaagaagcggacggagctgttcattgccgccgagggcattcacacgggccagtttgtgtattgcggcaagaaggcccagctcaacattggcaatgtgctccctgtgggcaccatgcctgagggtacaatcgtgtgctgcctggaggagaagcctggagaccgtggcaagctggcccgggcatcagggaactatgccaccgttatctcccacaaccctgagaccaagaagacccgtgtgaagctgccctccggctccaagaaggttatctcctcagccaacagagctgtggttggtgtggtggctggaggtggccgaattgacaaacccatcttgaaggctggccgggcgtaccacaaatataaggcaaagaggaactgctggccacgagtacggggtgtggccatgaatcctgtggagcatccttttggaggtggcaaccaccagcacatcggcaagccctccaccatccgcagagatgcccctgctggccgcaaagtgggtctcattgctgcccgccggactggacgtctccggggaaccaagactgtgcaggagaaagagaactagtgctgagggcctcaataaagtttgtgtttatgccaaaaaaaaaaaaaaaaaaaaaaaaaaaaa

SEQ ID NO: 145 - DNA, 2856 bp, Homo sapiens
  ref <308>: DATABASE ACCESSION NUMBER: NCBI / NM_004689
  ref <309>: DATABASE ENTRY DATE: 2011-12-18
  ref <313>: RELEVANT RESIDUES IN SEQ ID NO: (1)..(2856)
gcggccctcccgtccctgcgcggcctcggcggcctcggcggcggcggcggcggcggcggcggcagcagcgcggcccctttaaacgcctgcggcgccccccgcccccgccatcgcgcctccattttcccggccgcccgcgccgagcgccgcgcccgccccgggcccctccgccgccgccggcccggacatggccgccaacatgtacagggtcggagactacgtctactttgagaactcctccagcaacccatacctgatccggagaatcgaggagctcaacaagacggccaatgggaacgtggaggccaaagtggtgtgcttctaccggaggcgggacatctccagcaccctcatcgccctggccgacaagcacgcaaccctgtcagtctgctataaggccggaccgggggcggacaacggcgaggaaggggaaatagaagaggaaatggagaatccggaaatggtggacctgcccgagaaactaaagcaccagctgcggcatcgggagctgttcctctcccggcagctggagtctctgcccgccacgcacatcaggggcaagtgcagcgtcaccctgctcaacgagaccgagtcgctcaagtcctacctggagcgggaggatttcttcttctattctctagtctacgacccacagcagaagaccctgctggcagataaaggagagattcgagtaggaaaccggtaccaggcagacatcaccgacttgttaaaagaaggcgaggaggatggccgagaccagtccaggttggagacccaggtgtgggaggcgcacaacccactcacagacaagcagatcgaccagttcctggtggtggcccgctctgtgggcaccttcgcacgggccctggactgcagcagctccgtccgacagcccagcctgcacatgagcgccgcagctgcctcccgagacatcaccctgttccacgccatggatactctccacaagaacatctacgacatctccaaggccatctcggcgctggtgccgcagggcgggcccgtgctctgcagggacgagatggaggagtggtctgcatcagaggccaaccttttcgaggaagccctggaaaaatatgggaaggatttcacggacattcagcaagattttctcccgtggaagtcgctgaccagcatcattgagtactactacatgtggaagaccaccgacagatacgtgcagcagaaacgcttgaaagcagctgaagctgagagcaagttaaagcaagtttatattcccaactataacaagccaaatccgaaccaaatcagcgtcaacaacgtcaaggccggtgtggtgaacggcacgggggcgccgggccagagccctggggctggccgggcctgcgagagctgttacaccacacagtcttaccagtggtattcttggggtccccctaacatgcagtgtcgtctctgcgcatcttgttggacatattggaagaaatatggtggcttgaaaatgccaacccggttagatggagagaggccaggaccaaaccgcagtaacatgagtccccacggcctcccagcccggagcagcgggagccccaagtttgccatgaagaccaggcaggctttctatctgcacacgacgaagctgacgcggatcgcccggcgcctgtgccgtgagatcctgcgcccgtggcacgctgcgcggcacccctacctgcccatcaacagcgcggccatcaaggccgagtgcacggcgcggctgcccgaagcctcccagagcccgctggtgctgaagcaggcggtacgcaagccgctggaagccgtgcttcggtatcttgagacccacccccgcccccccaagcctgaccccgtgaaaagcgtgtccagcgtgctcagcagcctgacgcccgccaaggtggcccccgtcatcaacaacggctcccccaccatcctgggcaagcgcagctacgagcagcacaacggggtggacggcaacatgaagaagcgcctcttgatgcccagtaggggtctggcaaaccacggacaggccaggcacatgggaccaagccggaacctcctgctcaacgggaagtcctaccccaccaaagtgcgcctgatccgggggggctccctgcccccagtcaagcggcggcggatgaactggatcgacgccccggatgacgtgttctacatggccacagaggagaccaggaagatccgcaagctgctctcatcctcggaaaccaagcgtgctgcccgccggccctacaagcccatcgccctgcgccagagccaggccctgccgccgcggccaccgccacctgcgcccgtcaacgacgagcccatcgtcatcgaggactaggggccgcccccacctgcggccgccccccgcccctcgcccgcccacacggccccttcccagccagcccgccgcccgcccctcagtttggtagtgccccacctcccgccctcacctgcagagaaacgcgctccttggcggacactgggggaggagaggaagaagcgcggctaacttattccgagaatgccgaggagttgtcgtttttagctttgtgtttactttttggctggagcggagatgaggggccaccccgtgcccctgtgctgcggggccttttgcccggaggccgggccctaaggttttgttgtgttctgttgaaggtgccattttaaattttatttttattactttttttgtagatgaacttgagctctgtaacttacacctggaatgttaggatcgtgcggccgcggccggccgagctgcctggcggggttggcccttgtcttttcaagtaattttcatattaaacaaaaacaaagaaaaaaaatcttataaaaaggaaaaaaaaaaaaaaaaaa

SEQ ID NO: 146 - DNA, 4246 bp, Homo sapiens
  ref <308>: DATABASE ACCESSION NUMBER: NCBI / NM_001848
  ref <309>: DATABASE ENTRY DATE: 2011-11-21
  ref <313>: RELEVANT RESIDUES IN SEQ ID NO: (1)..(4246)
gctctcactctggctgggagcagaaggcagcctcggtctctgggcggcggcggcggcccactctgccctggccgcgctgtgtggtgaccgcaggccccagacatgagggcggcccgtgctctgctgcccctgctgctgcaggcctgctggacagccgcgcaggatgagccggagaccccgagggccgtggccttccaggactgccccgtggacctgttctttgtgctggacacctctgagagcgtggccctgaggctgaagccctacggggccctcgtggacaaagtcaagtccttcaccaagcgcttcatcgacaacctgagggacaggtactaccgctgtgaccgaaacctggtgtggaacgcaggcgcgctgcactacagtgacgaggtggagatcatccaaggcctcacgcgcatgcctggcggccgcgacgcactcaaaagcagcgtggacgcggtcaagtactttgggaagggcacctacaccgactgcgctatcaagaaggggctggagcagctcctcgtggggggctcccacctgaaggagaataagtacctgattgtggtgaccgacgggcaccccctggagggctacaaggaaccctgtggggggctggaggatgctgtgaacgaggccaagcacctgggcgtcaaagtcttctcggtggccatcacacccgaccacctggagccgcgtctgagcatcatcgccacggaccacacgtaccggcgcaacttcacggcggctgactggggccagagccgcgacgcagaggaggccatcagccagaccatcgacaccatcgtggacatgatcaaaaataacgtggagcaagtgtgctgctccttcgaatgccagcctgcaagaggacctccggggctccggggcgaccccggctttgagggagaacgaggcaagccggggctcccaggagagaagggagaagccggagatcctggaagacccggggacctcggacctgttgggtaccagggaatgaagggagaaaaagggagccgtggggagaagggctccaggggacccaagggctacaagggagagaagggcaagcgtggcatcgacggggtggacggcgtgaagggggagatggggtacccaggcctgccaggctgcaagggctcgcccgggtttgacggcattcaaggaccccctggccccaagggagaccccggtgcctttggactgaaaggagaaaagggcgagcctggagctgacggggaggcggggagaccagggagctcgggaccatctggagacgagggccagccgggagagcctgggccccccggagagaaaggagaggcgggcgacgaggggaacccaggacctgacggtgcccccggggagcggggtggccctggagagagaggaccacgggggaccccaggcacgcggggaccaagaggagaccctggtgaagctggcccgcagggtgatcagggaagagaaggccccgttggtgtccctggagacccgggcgaggctggccctatcggacctaaaggctaccgaggcgatgagggtcccccagggtccgagggtgccagaggagccccaggacctgccggaccccctggagacccggggctgatgggtgaaaggggagaagacggccccgctggaaatggcaccgagggcttccccggcttccccgggtatccgggcaacaggggcgctcccgggataaacggcacgaagggctaccccggcctcaagggggacgagggagaagccggggaccccggagacgataacaacgacattgcaccccgaggagtcaaaggagcaaaggggtaccggggtcccgagggcccccagggacccccaggacaccaaggaccgcctgggccggacgaatgcgagattttggacatcatcatgaaaatgtgctcttgctgtgaatgcaagtgcggccccatcgacctcctgttcgtgctggacagctcagagagcattggcctgcagaacttcgagattgccaaggacttcgtcgtcaaggtcatcgaccggctgagccgggacgagctggtcaagttcgagccagggcagtcgtacgcgggtgtggtgcagtacagccacagccagatgcaggagcacgtgagcctgcgcagccccagcatccggaacgtgcaggagctcaaggaagccatcaagagcctgcagtggatggcgggcggcaccttcacgggggaggccctgcagtacacgcgggaccagctgctgccgcccagcccgaacaaccgcatcgccctggtcatcactgacgggcgctcagacactcagagggacaccacaccgctcaacgtgctctgcagccccggcatccaggtggtctccgtgggcatcaaagacgtgtttgacttcatcccaggctcagaccagctcaatgtcatttcttgccaaggcctggcaccatcccagggccggcccggcctctcgctggtcaaggagaactatgcagagctgctggaggatgccttcctgaagaatgtcaccgcccagatctgcatagacaagaagtgtccagattacacctgccccatcacgttctcctccccggctgacatcaccatcctgctggacggctccgccagcgtgggcagccacaactttgacaccaccaagcgcttcgccaagcgcctggccgagcgcttcctcacagcgggcaggacggaccccgcccacgacgtgcgggtggcggtggtgcagtacagcggcacgggccagcagcgcccagagcgggcgtcgctgcagttcctgcagaactacacggccctggccagtgccgtcgatgccatggactttatcaacgacgccaccgacgtcaacgatgccctgggctatgtgacccgcttctaccgcgaggcctcgtccggcgctgccaagaagaggctgctgctcttctcagatggcaactcgcagggcgccacgcccgctgccatcgagaaggccgtgcaggaagcccagcgggcaggcatcgagatcttcgtggtggtcgtgggccgccaggtgaatgagccccacatccgcgtcctggtcaccggcaagacggccgagtacgacgtggcctacggcgagagccacctgttccgtgtccccagctaccaggccctgctccgcggtgtcttccaccagacagtctccaggaaggtggcgctgggctagcccaccctgcacgccggcaccaaaccctgtcctcccacccctccccactcatcactaaacagagtaaaatgtgatgcgaattttcccgaccaacctgattcgctagattttttttaaggaaaagcttggaaagccaggacacaacgctgctgcctgctttgtgcagggtcctccggggctcagccctgagttggcatcacctgcgcagggccctctggggctcagccctgagctagtgtcacctgcacagggccctctgaggctcagccctgagctggcgtcacctgtgcagggccctctggggctcagccctgagctggcctcacctgggttccccaccccgggctctcctgccctgccctcctgcccgccctccctcctgcctgcgcagctccttccctaggcacctctgtgctgcatcccaccagcctgagcaagacgccctctcggggcctgtgccgcactagcctccctctcctctgtccccatagctggtttttcccaccaatcctcacctaacagttactttacaattaaactcaaagcaagctcttctcctcagcttggggcagccattggcctctgtctcgttttgggaaaccaaggtcaggaggccgttgcagacataaatctcggcgactcggccccgtctcctgagggtcctgctggtgaccggcctggaccttggccctacagccctggaggccgctgctgaccagcactgaccccgacctcagagagtactcgcaggggcgctggctgcactcaagaccctcgagattaacggtgctaaccccgtctgctcctccctcccgcagagactggggcctggactggacatgagagccccttggtgccacagagggctgtgtcttactagaaacaacgcaaacctctccttcctcagaatagtgatgtgttcgacgttttatcaaaggccccctttctatgttcatgttagttttgctccttctgtgtttttttctgaaccatatccatgttgctgacttttccaaataaaggttttcactcctctaaaaaaaaaaaaaaaaaaaaa

SEQ ID NO: 147 - DNA, 1958 bp, Homo sapiens
  ref <308>: DATABASE ACCESSION NUMBER: NCBI / NM_004068
  ref <309>: DATABASE ENTRY DATE: 2011-11-19
  ref <313>: RELEVANT RESIDUES IN SEQ ID NO: (1)..(1958)
ggcggcggcactgcggtgaaagccgaggcagcgggcagacgagcagggggcgggcggacatcttgggatccggagagtggccgggccggcagagcagggggccgaggacaccaggtctgttctcagagcgatgggccgcggagactgatctgccgccatgattggaggcttattcatctataatcacaagggggaggtgctcatctcccgagtctaccgagatgacatcgggaggaacgcagtggatgcctttcgggtcaatgttatccatgcccggcagcaggtgcgcagccccgtcaccaacattgctcgcaccagcttcttccacgttaagcggtccaacatttggctggcagcagtcaccaagcagaatgtcaacgctgccatggtcttcgaattcctctataagatgtgtgacgtgatggctgcctactttggcaagatcagcgaggaaaacatcaagaacaattttgtgctcatatatgagctgctggatgagattctagactttggctacccacagaattccgagacaggcgcgctgaaaaccttcatcacgcagcagggcatcaagagtcagcatcagacaaaagaagagcagtcacagatcaccagccaggtaactgggcagattggctggcggcgagagggtatcaagtatcgtcggaatgagctcttcctggatgtgctggagagtgtgaacctgctcatgtccccacaagggcaggtgctgagtgcccatgtgtcgggccgggtggtgatgaagagctacctgagtggcatgcctgaatgcaagtttgggatgaatgacaagattgttattgaaaagcagggcaaaggcacagctgatgaaacaagcaagagcgggaagcaatcaattgccattgatgactgcaccttccaccagtgtgtgcgactcagcaagtttgactctgaacgcagcatcagctttatcccgccagatggagagtttgagcttatgaggtatcgcacaaccaaggacatcatccttcccttccgggtgatcccgctagtgcgagaagtgggacgcaccaaactggaggtcaaggtggtcatcaagtccaactttaaaccctcactgctggctcagaagatcgaggtgaggatcccaaccccactgaacacaagcggggtgcaggtgatctgcatgaaggggaaggccaagtacaaggccagcgagaatgccatcgtgtggaagatcaagcgcatggcaggcatgaaggaatcgcagatcagcgcagagattgagcttctgcctaccaacgacaagaagaaatgggctcgaccccccatttccatgaactttgaggtgccattcgcgccctctggcctcaaggtgcgctacttgaaggtgtttgaaccgaagctgaactacagcgaccatgatgtcatcaaatgggtgcgctacattggccgcagtggcatttatgaaactcgctgctagctgccactaggcagctagcccacctccccagccaccctcctccacaggtccaggtgccgctccctcccccaccacacatcagtgtctcctccctcctgctttgctgccttccctttgcaccagcccgagtctaggtctgggccaagcacattacaagtgggaccggtggagcagcccctgggctccctgggcaggggagttctgaggctcctgctctcccatccacctgtctgtcctggcctaatgccaggctctgagttctgtgaccaaagccaggtgggttccctttccttcccacccctgtggccacagctctggagtgggagggttggttgcccctcacctcagagctcccccaaaggccagtaatggatccccggcctcagtccctactctgctttgggatagtgtgagcttcattttgtacacgtgtgacttcgtccagttacaaacccaataaactctgtagagtggaaaaaaaaaaaaaaaaaaa

SEQ ID NO: 148 - DNA, 1005 bp, Homo sapiens
  ref <308>: DATABASE ACCESSION NUMBER: NCBI / NM_001687
  ref <309>: DATABASE ENTRY DATE: 2011-11-20
  ref <313>: RELEVANT RESIDUES IN SEQ ID NO: (1)..(1005)
cagacgtccctgcgcgtcgtcctcctcgccctccaggccgcccgcgccgcgccggagtccgctgtccgccagctacccgcttcctgccgcccgccgctgccatgctgcccgccgcgctgctccgccgcccgggacttggccgcctcgtccgccacgcccgtgcctatgccgaggccgccgccgccccggctgccgcctctggccccaaccagatgtccttcaccttcgcctctcccacgcaggtgttcttcaacggtgccaacgtccggcaggtggacgtgcccacgctgaccggagccttcggcatcctggcggcccacgtgcccacgctgcaggtcctgcggccggggctggtcgtggtgcatgcagaggacggcaccacctccaaatactttgtgagcagcggttccatcgcagtgaacgccgactcttcggtgcagttgttggccgaagaggccgtgacgctggacatgttggacctgggggcagccaaggcaaacttggagaaggcccaggcggagctggtggggacagctgacgaggccacgcgggcagagatccagatccgaatcgaggccaacgaggccctggtgaaggccctggagtaggcggtgcgtacccggtgtcccgaggcccggccaggggctgggcagggatgccaggtgggcccagccagctcctggggtcccggccacctggggaagccgcgcctgccaaggaggccaccagagggcagtgcaggcttctgcctgggccccaggccctgcctgtgttgaaagctctggggactgggccagggaagctcctcctcagctttgagctgtggctgccacccatggggctctccttccgcctctcaagatccccccagcctgacgggccgcttaccatcccctctgccctgcagagccagccgccaaggttgacctcagcttcggagccacctctggatgaactgcccccagcccccgccccattaaagacccggaagcctgaaaaaaaaaa

SEQ ID NO: 149 - DNA, 1620 bp, Homo sapiens
  ref <308>: DATABASE ACCESSION NUMBER: NCBI / NM_004197
  ref <309>: DATABASE ENTRY DATE: 2011-11-20
  ref <313>: RELEVANT RESIDUES IN SEQ ID NO: (1)..(1620)
gtcctccaaatgcagtgaggttaggaaggacgtctgcgctcagatcaagaatccagttacctcaaagctccccaacttccacctccgcagagctatgacgtcatggcaggcacgccagaggccgaaggatgcaaaagtggttttctgctttcgatgatgcaatcattcagcgacagtggcgggcaaacccctcccggggcgggggaggtgtgagcttcacgaaggaggttgacaccaacgtggccaccggcgcccctccacgccgccaacgagtccccgggcgtgcgtgcccttggagggagccaatccgcggccggcgtggggcccggcctggcggaggtgatgctggagggacgcccggggagaccgtacgtcactgctctgcgccggaagaccctattttcaggttctcttccctccattcctaccccttccccggtaccataaaatcccgggatatgagctggaagaggcatcacctgatcccggagacctttggagttaagaggcggcggaagcgagggcctgtggagtcggatcctcttcggggtgagccagggtcggcgcgcgcggctgtctcagaactcatgcagctgttcccgcgaggcctgtttgaggacgcgctgccgcccatcgtgctgaggagccaggtgtacagccttgtgcctgacaggaccgtggccgaccggcagctgaaggagcttcaagagcagggggagatcagaatcgtccagctgggcttcgacttggatgcccatggaattatcttcactgaggactacaggaccagagtcctcaaggcctgtgatggccgaccgtatgctggggcagtgcagaaatttctagcttcagtacttccagcctgtggggaccttagtttccagcaggaccaaatgacacagacctttggcttcagggactcagaaatcacgcatctggtgaatgctggagtcctcaccgtccgagatgctgggagctggtggctagctgtgcctggagctgggagattcatcaagtactttgttaaagggcgccaggctgtccttagcatggtccggaaggcaaagtaccgggaactgctcctatcagagctcctgggccggcgggcgcctgtcgtggtgcggcttggcctcacctaccatgtgcacgacctcattggggcccagctagtggactgcatctctaccacttcaggaaccctcctccgcctgccagagacatgaagattctgctcatcattgctcagctcctcagagtgggccgggaggggactagaagagctgcatgatggtggctgagacagggtcaccttgggaaggcttgggagccaggatgagtgtcgggctctcgtgtgtgcaaaaggtcagatgtgactgctgctgtttgcctggtttctgacccagtggtggggtttgagcaatgcttctctgcccttccatggaaagtggaaccagaaatggtgccaaggctgtggctgttccctttcgtgtaaaatggtgctgttattactctgtcttgaaataggaaggtgggatttctggggaggctggtgaaggagggcagggttcttttctctacgtgtcatgttaaaattgccaaataaagtacctctgcctgtga

SEQ ID NO: 150 - DNA, 514 bp, Homo sapiens
  ref <308>: DATABASE ACCESSION NUMBER: NCBI / NM_001028
  ref <309>: DATABASE ENTRY DATE: 2011-12-04
  ref <313>: RELEVANT RESIDUES IN SEQ ID NO: (1)..(514)
cttcctttttgtccgacatcttgacgaggctgcggtgtctgctgctattctccgagcttcgcaatgccgcctaaggacgacaagaagaagaaggacgctggaaagtcggccaagaaagacaaagacccagtgaacaaatccgggggcaaggccaaaaagaagaagtggtccaaaggcaaagttcgggacaagctcaataacttagtcttgtttgacaaagctacctatgataaactctgtaaggaagttcccaactataaacttataaccccagctgtggtctctgagagactgaagattcgaggctccctggccagggcagcccttcaggagctccttagtaaaggacttatcaaactggtttcaaagcacagagctcaagtaatttacaccagaaataccaagggtggagatgctccagctgctggtgaagatgcatgaataggtccaaccagctgtacatttggaaaaataaaactttattaaatcaaaaaaaaaaaaaaaaaaaaaaaaa

SEQ ID NO: 151 - DNA, 872 bp, Homo sapiens
  ref <308>: DATABASE ACCESSION NUMBER: NCBI / NM_001022
  ref <309>: DATABASE ENTRY DATE: 2011-12-25
  ref <313>: RELEVANT RESIDUES IN SEQ ID NO: (1)..(872)
gtactttcgccatcatagtattctccaccactgttccttccagccacgaacgacgcaaacgaagccaagttcccccagctccgaacaggagctctctatcctctctctattacactccgggagaaggaaacgcgggaggaaacccaggcctccacgcgcgaccccttggccctcccctttacctctccacccctcactagacaccctcccctctaggcggggacgaactttcgccctgagagaggcggagcctcagcgtctaccctcgctctcgcgagctttcggaactctcgcgagaccctacgcccgacttgtgcgcccgggaaaccccgtcgttccctttcccctggctggcagcgcggaggccgcacgatgcctggagttactgtaaaagacgtgaaccagcaggagttcgtcagagctctggcagccttcctcaaaaagtccgggaagctgaaagtccccgaatgggtggataccgtcaagctggccaagcacaaagagcttgctccctacgatgagaactggttctacacgcgagctgcttccacagcgcggcacctgtacctccggggtggcgctggggttggctccatgaccaagatctatgggggacgtcagagaaacggcgtcatgcccagccacttcagccgaggctccaagagtgtggcccgccgggtcctccaagccctggaggggctgaaaatggtggaaaaggaccaagatggcggccgcaaactgacacctcagggacaaagagatctggacagaatcgccggacaggtggcagctgccaacaagaagcattagaacaaaccatgctgggttaataaattgcctcattcgtaaaaaaaaaaaaaaaaaaaaaaaaa

SEQ ID NO: 152 - DNA, 3534 bp, Homo sapiens
  ref <308>: DATABASE ACCESSION NUMBER: NCBI / NM_004759
  ref <309>: DATABASE ENTRY DATE: 2011-11-28
  ref <313>: RELEVANT RESIDUES IN SEQ ID NO: (1)..(3534)
gggcgccgggccggtgggagccagcggcgcgcggtgggacccacggagccccgcgacccgccgagcctggagccgggccgggtcggggaagccggctccagcccggagcgaacttcgcagcccgtcggggggcggcggggagggggcccggagccggaggagggggcggccgcgggcacccccgcctgtgccccggcgtccccgggcaccatgctgtccaactcccagggccagagcccgccggtgccgttccccgccccggccccgccgccgcagccccccacccctgccctgccgcaccccccggcgcagccgccgccgccgcccccgcagcagttcccgcagttccacgtcaagtccggcctgcagatcaagaagaacgccatcatcgatgactacaaggtcaccagccaggtcctggggctgggcatcaacggcaaagttttgcagatcttcaacaagaggacccaggagaaattcgccctcaaaatgcttcaggactgccccaaggcccgcagggaggtggagctgcactggcgggcctcccagtgcccgcacatcgtacggatcgtggatgtgtacgagaatctgtacgcagggaggaagtgcctgctgattgtcatggaatgtttggacggtggagaactctttagccgaatccaggatcgaggagaccaggcattcacagaaagagaagcatccgaaatcatgaagagcatcggtgaggccatccagtatctgcattcaatcaacattgcccatcgggatgtcaagcctgagaatctcttatacacctccaaaaggcccaacgccatcctgaaactcactgactttggctttgccaaggaaaccaccagccacaactctttgaccactccttgttatacaccgtactatgtggctccagaagtgctgggtccagagaagtatgacaagtcctgtgacatgtggtccctgggtgtcatcatgtacatcctgctgtgtgggtatccccccttctactccaaccacggccttgccatctctccgggcatgaagactcgcatccgaatgggccagtatgaatttcccaacccagaatggtcagaagtatcagaggaagtgaagatgctcattcggaatctgctgaaaacagagcccacccagagaatgaccatcaccgagtttatgaaccacccttggatcatgcaatcaacaaaggtccctcaaaccccactgcacaccagccgggtcctgaaggaggacaaggagcggtgggaggatgtcaaggggtgtcttcatgacaagaacagcgaccaggccacttggctgaccaggttgtgagcagaggattctgtgttcctgtccaaactcagtgctgtttcttagaatccttttattccctgggtctctaatgggaccttaaagaccatctggtatcatcttctcattttgcagaagagaaactgaggcccagaggcggagggcagtctgctcaaggtcacgcagctggtgactggttggggcagaccggacccaggtttcctgactcctggcccaagtctcttcctcctatcctgcgggatcactggggggctctcagggaacagcagcagtgccatagccaggctctctgctgcccagcgctggggtgaggctgccgttgtcagcgtggaccactaaccagcccgtcttctctctctgctcccacccctgccgccctcaccctgcccttgttgtctctgtctctcacgtctctcttctgctgtctctcctacctgtcttctggctctctctgtacccttcctggtgctgccgtgcccccaggaggagatgaccagtgccttggccacaatgcgcgttgactacgagcagatcaagataaaaaagattgaagatgcatccaaccctctgctgctgaagaggcggaagaaagctcgggccctggaggctgcggctctggcccactgagccaccgcgccctcctgcccacgggaggacaagcaataactctctacaggaatatattttttaaacgaagagacagaactgtccacatctgcctcctctcctcctcagctgcatggagcctggaactgcatcagtgactgaattctgccttggttctggccaccccagagtgggagaggctgggaggttgggaggctgtggagagaagtgagcaaggtgctcttgaacctgtgctcattttgcaattttatcagtaatttgacttagagtttttacgaaacctcttttgttgtccttgccccactcctctccaccagacgccttcctctctggatactgcaaaggcttgtggtttgttagagggtatttgtggaaactgtcatagggattgtccctgtgttgtcccatctgccctccctgtttctccacaacagcctggggttgtccccgctggctcacgcgttctgggagctcaaggccaccttggaggaggatgccacgcacttcctctctcggagccctcagacatctccagtgtgccagacaaataggagtgagtgtatgtgtgtgtgtgtgtgtgtgtgtgtgcacacgtgtgtatgagtgcgcagatctgtgcctgggatcgtgcatttgaggggccaggggcaggcagggctgcagagggagacggccctgctggggcttaggaaccttctcccttcttgggtctgccctgcccatactgagcctgccaaagtgcctgggaagcccacccagattctgaaacaggccctctgtggcctgtctctattagctgggttccgggaggcagagaggagtgaccgggcactggcactgcgatcaggaagactggacccccagcccccagggcccccctccccccacttagtgctggtcctaggtcctctgaggcactcatctactgaatgacctctctacttccccttcttgccattattaacccatttttgtttattttccttaaatttttagccatttctccatgggccaccgcccagctcatgtaggtgagcctgggcagcttctgttggcagagcttttgcatttcctgtgtttgtcctgggttctggggcatcagccagctaccccttgtgggcaaaggcagggccacttttgaagtcttccctcagatttccattgtgtggcctggtgggtcagggggagtctttgcaccaaagatgtcctgactttgcccccttgcccatcagccatttgccatcaccccaaacaactcagcttcggggccggtgaggggaggggcctcccccagcacagatgaggagcagctggggtaggctgtctgtgccatggccccccactcccccttcccttggagggagaggtggcaggaatacttcacctttcctctccctcaggggcaggtggtggaggggcgcccagggtcgtctttgtgtatgggggaaggcgctgggtgcctgcagcgcctcccttgtctcagatggtgtgtccagcactcgattgttgtaaactgttgttttgtatgagcgaaattgtctttactaaacagatttaatagttgagaaaaaaaaaaaaaaaaaa

SEQ ID NO: 153 - DNA, 639 bp, Homo sapiens
  ref <308>: DATABASE ACCESSION NUMBER: NCBI / NM_001623
  ref <309>: DATABASE ENTRY DATE: 2011-12-24
  ref <313>: RELEVANT RESIDUES IN SEQ ID NO: (1)..(639)
gagagaaggagagcctgcagacagaggcctccagcttggtctgtctccccacctctaccagcatctgctgagctatgagccaaaccagggatttacagggaggaaaagctttcggactgctgaaggcccagcaggaagagaggctggatgagatcaacaagcaattcctagacgatcccaaatatagcagtgatgaggatctgccctccaaactggaaggcttcaaagagaaatacatggagtttgaccttaatggaaatggcgatattgatatcatgtccctgaaacgaatgctggagaaacttggagtccccaagactcacctagagctaaagaaattaattggagaggtgtccagtggctccggggagacgttcagctaccctgactttctcaggatgatgctgggcaagagatctgccatcctaaaaatgatcctgatgtatgaggaaaaagcgagagaaaaggaaaagccaacaggccccccagccaagaaagctatctctgagttgccctgatttgaagggaaaagggatgatgggattgaaggggcttctaatgacccagatatggaaacagaagacaaaattgtaagccagagtcaacaaattaaataaattaccccctcctccagatcaa

SEQ ID NO: 154 - DNA, 673 bp, Homo sapiens
  ref <308>: DATABASE ACCESSION NUMBER: NCBI / NM_004894
  ref <309>: DATABASE ENTRY DATE: 2011-08-16
  ref <313>: RELEVANT RESIDUES IN SEQ ID NO: (1)..(673)
cttcccggcatcccctgcgcgcgcctgcgcgctcggtgacctttccgagttggctgcagatttgtggtgcgttctgagccgtctgtcctgcgccaagatgcttcaaagtattattaaaaacatatggatccccatgaagccctactacaccaaagtttaccaggagatttggataggaatggggctgatgggcttcatcgtttataaaatccgggctgctgataaaagaagtaaggctttgaaagcttcagcgcctgctcctggtcatcactaaccagatttacttggagtacatgtgaaagaaaacgtcagtctgcctgtaaatttcagcaagccgtgttagatggggagcgtggaacgtcactgtacacttgtataagtaccgtttacttcatggcatgaataaatggatctgtgagatgcactgctacctggtactgctttcagtgtgttccccctcagcccctccggcgtgtcaggcatactctgagtagataatttgtcatgcagcgcatgcaatcagaatctcactgagccacccatcattgtgaaataattacctcagttgtacaggacttggtgatcaggatccaggcactcacttgtattctactgctcaataaacgtttattaaacttgatcctgctacttaaaaaaaaaaaaaaaaaaaaaa

SEQ ID NO: 155 - DNA, 6337 bp, Homo sapiens
  ref <308>: DATABASE ACCESSION NUMBER: NCBI / NM_002375
  ref <309>: DATABASE ENTRY DATE: 2011-12-18
  ref <313>: RELEVANT RESIDUES IN SEQ ID NO: (1)..(6337)
aggccccacccgctggtggcccggtccgcgtgtgcgccgactctcgcactctcctcgctccgggcgcccagactctgagagagagcgacggccatcatagaacagcgaaggcagtcgatcggcctgcggtccgcttcggcattcgcaggccgcaggcgggaggctagagcccccaggcgcacctcgccccaaccgcccgcggctcgggcagctctgcagagacgtcgtggcggcagggccagcacccattggtccgccacagccctccgccctccccctcgccacgcttattggccggagcggcggcgctcgccgggtaggcggtggcggcgtccctcccttgcgccggccctcaagaggcgacgaggaagcggccgcctccctgcgccccgcccctccggctagctcgctggctcccggctcctcccgacgtctcctacctcctcacggctcttcccggcgctctcctggctcccttctgccccagctccgtctcggcggcggcgggcagttgcagtggtgcagaatggctgacctcagtcttgcagatgcattaacagaaccatctccagacattgagggagagataaagcgggacttcattgccacactagaggcagaggcctttgatgatgttgtgggagaaactgttggaaaaacagactatattcctctcctggatgttgatgagaaaaccgggaactcagagtcaaagaagaaaccgtgctcagaaactagccagattgaagatactccatcttctaaaccaacactcctagccaatggtggtcatggagtagaagggagcgatactacagggtctccaactgaattccttgaagagaaaatggcctaccaggaatacccaaatagccagaactggccagaagataccaacttttgtttccaacctgagcaagtggtcgatcctatccagactgatccctttaagatgtaccatgatgatgacctggcagatttggtctttccctccagtgcgacagctgatacttcaatatttgcaggacaaaatgatcccttgaaagacagttacggtatgtctccctgcaacacagctgttgtacctcaggggtggtctgtggaagccttaaactctccacactcagagtcctttgtttccccagaggctgttgcagaacctcctcagccaacggcagttcccttagagctagccaaggagatagaaatggcatcagaagagaggccaccagcacaagcattggaaataatgatgggactgaagactactgacatggcaccatctaaagaaacagagatggccctcgccaaggacatggcactagctacaaaaaccgaggtggcattggctaaagatatggaatcacccaccaaattagatgtgacactggccaaggacatgcagccatccatggaatcagatatggccctagtcaaggacatggaactacccacagaaaaagaagtggccctggttaaggatgtcagatggcccacagaaacagatgtatcttcagccaagaatgtggtactgcccacagaaacagaggtagccccagccaaggatgtgacactgttgaaagaaacagagagggcatctcctataaaaatggacttagccccttccaaggacatgggaccacccaaagaaaacaagaaagaaacagagagggcatctcctataaaaatggacttggctccttccaaggacatgggaccacccaaagaaaacaagatagtcccagccaaggatttggtattactctcagaaatagaggtggcacaggctaatgacattatatcatccacagaaatatcctctgctgagaaggtggctttgtcctcagaaacagaggtagccctggccagggacatgacactgcccccggaaaccaacgtgatcttgaccaaggataaagcactacctttagaagcagaggtggccccagtcaaggacatggctcaactcccagaaacagaaatagccccggccaaggatgtggctccgtccacagtaaaagaagtgggcttgttgaaggacatgtctccactatcagaaacagaaatggctctgggcaaggatgtgactccacctccagaaacagaagtagttctcatcaagaacgtatgtctgcctccagaaatggaggtggccctgactgaggatcaggtcccagccctcaaaacagaagcacccctggctaaggatggggttctgaccctggccaacaatgtgactccagccaaagatgttccaccactctcagaaacagaggcaacaccagttccaattaaagacatggaaattgcacaaacacaaaaaggaataagtgaggattcccatttagaatctctgcaggatgtggggcagtcagctgcacctactttcatgatttcaccagaaaccgtcacaggaacggggaaaaagtgcagcttgccggccgaggaggattctgtgttagaaaaactaggggaaaggaaaccatgcaacagtcaaccttctgagctttcttcagagacctcaggaatagccaggccagaagaaggaaggcctgtggtgagtgggacaggaaatgacatcaccaccccaccgaacaaggagctcccaccaagcccagagaagaaaacaaagcctttggccaccactcaacctgcaaagacttcaacatcgaaagccaaaacacagcccacttctctccctaagcagccagctcccaccaccattggtgggttgaataaaaaacccatgagccttgcttcaggcttagtgccagctgccccacccaaacgccctgccgtcgcctctgccaggccttccatcttaccttcaaaagacgtgaagccaaagcccattgcagatgcaaaggctcctgagaagcgggcctcaccatccaagccagcttctgccccagcctccagatctgggtccaagagcactcagactgttgcaaaaaccacaacagctgctgctgttgcctcaactggcccaagcagtaggagcccctccacgctcctgcccaagaagcccactgccattaagactgagggaaaacctgcagaagtcaagaagatgactgcaaagtctgtaccagctgacttgagtcgcccaaagagcacctccaccagttccatgaagaaaaccaccactctcagtgggacagcccccgctgcaggggtggttcccagccgagtcaaggccacacccatgccctcccggccctccacaactcctttcatagacaagaagcccacctcggccaaacccagctccaccaccccccggctcagccgcctggccaccaatacttctgctcctgatctgaagaatgtccgctccaaggttggctccacggaaaacatcaagcatcagcctggaggaggccgggccaaagtagagaaaaaaacagaggcagctgctacaacccgaaagcctgaatctaatgcagtcactaaaacagccggcccaattgcaagtgcacagaaacaacctgcggggaaagtccagatagtctccaaaaaagtgagctacagccatattcagtccaagtgtggttccaaggacaatattaagcatgtccctggaggtggtaatgttcagattcagaacaagaaagtggacatctctaaggtctcctccaagtgtgggtctaaggctaacatcaagcacaagcctggtggaggagatgtcaagattgaaagtcagaagttgaacttcaaggagaaggcccaggccaaggtgggatccctcgataatgtgggccacctacctgcaggaggtgctgtgaagactgagggcggtggcagcgaggctcctctgtgtccgggtccccctgctggggaggagccggccatctctgaggcagcgcctgaagctggcgcccccacttcagccagtggcctcaatggccaccccaccctgtcagggggtggtgaccaaagggaggcccagaccttggacagccagatccaggagacaagcatctaatgatgacattctggtctcgtcttccgtctcccccgtgttcccctcttgtctcccctgttcccctctcccttccctcctcccatgtcactgcagattgagacctacaggctgacgttccgggcaaatgccagggcccgcaccgaccacggggccgacattgtctcccgccccccacacttccctggcggccccaactcgggctcccgggtccttggccccctttcccgggctgtccactagaccagtgagcgcttgggcgccgtgctgggcagcccgctaggctcgccttccctcctgctttgcgtgcccggggcagcagcagccctgccccacacctcctctcactccccagcctgggcccatctccctgctttggtcttgccccatcactgcgccactgctccgtggaggaggttgggagggggttggggtggttgaggctaagttgggatctaggagaggagaaccagattctatcctcatctttttttggttctttggtccaaacccaaaagaaactgacatgccctcccttctccctggatctacctggagggaagagtggaggtggattccgagtggtgacaggacgctgaccgtggagcttaagccactgcctctccctctggtcccacaaatgggcgcccccccctccccatgcaggtggtgtcgggcccttcttgctgccctgccccaagttgggggtcagtgctgcctgtccccatgcttaacatacccgcctagctgctgtcacatttttcttgttttgtccttttatttttttctaataacctaaaaactggcaaaatagttctgcaggttgaagccatgtctacatgaaagtcctcagtaagtgttagagggaacagggcggagatatccttatgccacccccgctggaggatgtgggcagcttagggccctggaggcggtgcggcagggaagaggggtgcagaggctgtggctggtgagccggtcaggcacacaaggggcccttggagcgtggactggttggttttgccattttgttgtgtgtatgctgcttttcttttctaaccaagaggctggttttggcatctctgtcccattccctgggatctggtggtcagccctaggataaaaagccagggctggagaacaagaaagggccaggagatggaattccttcaggccggcacccacaccctaggacatgtaagccctcatgtccaagggagcctcatgcagatagtaggaaatcaggtctggaaatttaaaaataaaaggcatgagactaaggctatctgcttcccttatgccctgactggagaggggagggaggagaggcaaggcccacagagggcatcccagctaggccttgggatggctgcagtgaggagaaatcccgggaactgtattgacacaaagattcttattgcacttgtattttttgtattaaagtttgcatggtttctaataaaggattcaaacataagtttgtagtgaaatggcctgggagattccaagggcttctctggagggggattggctgcagtgtagatttgcctctgaggaggctgccccagacttggcctcctcatgccccctcctgacctctgcccttctctggtcctggcatccctggagaaggtaggggtcttgacctaagtttagatttgatctccatgtgcagggaggctgtcctgggcctgacaggtcctccccctttctgaggtagcagtgccttgtggaggtttgacaccatgtccctagctccccaagcacacaccaggaaactgcaggggctcacggaggaagtgctgcctgggccagggggaccagctttcctccgtagagaccatgtgcagaacacttctgctgtgccaagaacatgagggagccagtgttttgtcagcaggaagaaagggcctgctgggatgaaagtgggaaggaaacagggttgcgtagtcaggagacacctcaggggcaacagcacaggcccagagtacctgctgcctccactgcgtctgtcctggggtcatgaggatgctgaggttgacgacaggttccaggtcctttcactcctttggccaaaggttgggggtaggtggcccaagtggcgtgctctctaggtagacaacaggagtggtcagagttccctcaaaggatcctccactccagagcacctgagaaggccgggaccagaggccctgtgtgatgtgtactccgcagctgtttggggtgggacatttctgtacttctcgatttgcttatggctcagccattacctgtgtcagtccatgattctgttgtaacagttttaagagtaaataaataaagctgcctgatgtcccatcacgcagaaaaaaaaaa

SEQ ID NO: 156 - DNA, 753 bp, Homo sapiens
  ref <308>: DATABASE ACCESSION NUMBER: NCBI / NM_001013
  ref <309>: DATABASE ENTRY DATE: 2011-11-21
  ref <313>: RELEVANT RESIDUES IN SEQ ID NO: (1)..(753)
ctctttctcagtgaccgggtggtttgcttaggcgcagacggggaagcggagccaacatgccagtggcccggagctgggtttgtcgcaaaacttatgtgaccccgcggagacccttcgagaaatctcgtctcgaccaagagctgaagctgatcggcgagtatgggctccggaacaaacgtgaggtctggagggtcaaatttaccctggccaagatccgcaaggccgcccgggaactgctgacgcttgatgagaaggacccacggcgtctgttcgaaggcaacgccctgctgcggcggctggtccgcattggggtgctggatgagggcaagatgaagctggattacatcctgggcctgaagatagaggatttcttagagagacgcctgcagacccaggtcttcaagctgggcttggccaagtccatccaccacgctcgcgtgctgatccgccagcgccatatcagggtccgcaagcaggtggtgaacatcccgtccttcattgtccgcctggattcccagaagcacatcgacttctctctgcgctctccctacgggggtggccgcccgggccgcgtgaagaggaagaatgccaagaagggccagggtggggctggggctggagacgacgaggaggaggattaagtccacctgtccctcctgggctgctggattgtctcgttttcctgccaaataaacaggatcagcgctttacaaaaaaaaaaaaaaaaaaaaaaaaaaaaaaaaaaaaaaaaaa

SEQ ID NO: 157 - DNA, 2417 bp, Homo sapiens
  ref <308>: DATABASE ACCESSION NUMBER: NCBI / NM_003779
  ref <309>: DATABASE ENTRY DATE: 2011-11-28
  ref <313>: RELEVANT RESIDUES IN SEQ ID NO: (1)..(2417)
gcctgcgggatacaacgggaatacaaaaatgcgctagagcggtccgcaacgctgtagcctgcgtaaggaacaattgatactaagtggcactaggctgcagggggtgccactgacacactgggagagggctcagccaaccacaaggtgataacgaggtcagcggagcaccagaaaccggctcactagcctcctgatcagtctcggcccagaggaaaatgaagggcttgagcttctgcttttacaaatctgaggggcaggaaatgaaatcccactagcagtctgcgtagtggagttgaaccctagcacccgctccccagggggtcgcctacaacgcgttccaggtgggcaggctcaggcgctgctccctcacaagcccccggccacgcggtgtctgggaccgggtgcctagtcagcccgggtggctccgccccgaggccccgccccatgacgcgagaccccgcccccgcagcgcccgcttccaagatggcggcagcgatgcctgcccggctgttggggtggcggtgacgacaggcagcaaaagaccagctggtcccagattcgctgctggagtgctggatggagcctttctctgccctctgtgacatttccaattttagataatgcctcacatctctgtccccccgggaccccctggagcccccatgatccctaagaagacagcttgaacctagatctcacccccaggatgttgcggaggctgctggagcggccttgcacgctggccctgcttgtgggctcccagctggctgtcatgatgtacctgtcactggggggcttccgaagtctcagtgccctatttggccgagatcagggaccgacatttgactattctcaccctcgtgatgtctacagtaacctcagtcacctgcctggggccccagggggtcctccagctcctcaaggtctgccctactgtccagaacgatctcctctcttagtgggtcctgtgtcggtgtcctttagcccagtgccatcactggcagagattgtggagcggaatccccgggtagaaccagggggccggtaccgccctgcaggttgtgagccccgctcccgaacagccatcattgtgcctcatcgtgcccgggagcaccacctgcgcctgctgctctaccacctgcaccccttcttgcagcgccagcagcttgcttatggcatctatgtcatccaccaggctggaaatggaacatttaacagggcaaaactgttgaacgttggggtgcgagaggccctgcgtgatgaagagtgggactgcctgttcttgcacgatgtggacctcttgccagaaaatgaccacaatctgtatgtgtgtgacccccggggaccccgccatgttgccgttgctatgaacaagtttggatacagcctcccgtacccccagtacttcggaggagtctcagcacttactcctgaccagtacctgaagatgaatggcttccccaatgaatactggggctggggtggtgaggatgacgacattgctaccagggtgcgcctggctgggatgaagatctctcggccccccacatctgtaggacactataagatggtgaagcaccgaggagataagggcaatgaggaaaatccccacagatttgacctcctggtccgtacccagaattcctggacgcaagatgggatgaactcactgacataccagttgctggctcgagagctggggcctctttataccaacatcacagcagacattgggactgaccctcggggtcctcgggctccttctgggccacgttacccacctggttcctcccaagccttccgtcaagagatgctgcaacgccggcccccagccaggcctgggcctctatctactgccaaccacacagccctccgaggttcacactgactcctccttcctgtctaccttaatcatgaaaccgaattcatggggttgtattctccccaccctcagctcctcactgttctcagagggatgtgagggaactgaactctggtgccgtgctagggggtaggggcctctccctcactgctggactggagctgggctcctgtagacctgaggggtccctctctctagggtctcctgtagggcttatgactgtgaatccttgatgtcatgattttatgtgacgattcctaggagtccctgcccctagagtaggagcagggctggaccccaagcccctccctcttccatggagagaagagtgatctggcttctcctcggacctctgtgaatatttattctatttatggttcccgggaagttgtttggtgaaggaagcccctccctgggcattttctgcctatgctggaatagctccctcttctggtcctggctcagggggctgggattttgatatattttctaataaaggactttgtctcgcaaaaaaaaaaaaaaaaaaaaaaaa

SEQ ID NO: 158 - DNA, 2978 bp, Homo sapiens
  ref <308>: DATABASE ACCESSION NUMBER: NCBI / NM_001296
  ref <309>: DATABASE ENTRY DATE: 2011-11-26
  ref <313>: RELEVANT RESIDUES IN SEQ ID NO: (1)..(2978)
ggatacagtacgggatcctttctggaatggaggtcttatgagctgctattgaacacggcagagcctgttggtgacctgcacacaggagccctccagtcagtactgattgaattactcaaggctgcctctctgcaaagttgagcactacaggacgtcgggactgggcatttccttccaacatggccgccactgcctctccgcagccactcgccactgaggatgccgattctgagaatagcagcttctattactatgactacctggatgaagtggccttcatgctctgcaggaaggatgcagtggtgtcctttggcaaagtcttcctcccagtcttctatagcctgatttttgtgttgggcctcagcgggaacctccttcttctcatggtcttgctccgttacgtgcctcgcaggcggatggttgagatctatctgctgaatctggccatctccaaccttctgtttctggtgacactgcccttctggggcatctccgtggcctggcattgggtcttcgggagtttcttgtgcaagatggtgagcactctttatactattaacttttacagtggcatctttttcattagctgcatgagcctggacaagtacctggagatcgttcatgctcagccctaccacaggctgaggacccgggccaagagcctgctccttgctaccatagtatgggctgtgtccctggccgtctccatccctgatatggtctttgtacagacacatgaaaatcccaagggtgtgtggaactgccacgcagatttcggcgggcatgggaccatttggaagctcttcctccgcttccagcagaacctcctagggtttctccttccactccttgccatgatcttcttctactcccgtattggttgtgtcttggtgaggctgaggcccgcaggccagggccgggctttaaaaatagctgcagccttggtggtggccttcttcgtgctatggttcccatacaatctcaccttgtttctgcatacgctgttggacctgcaagtattcgggaactgtgaggtcagccagcatctagactacgcactccaggtaacagagagcatcgccttccttcactgctgcttttcccccatcctgtatgccttctccagtcaccgcttccgccagtacctgaaggctttcctggctgccgtgcttggatggcacctggcacctggcactgcccaggcctcattatccagctgttctgagagcagcatacttactgcccaagaggaaatgactggcatgaatgaccttggagagaggcagtctgagaactaccctaacaaggaggatgtggggaataaatcagcctgagtgaccaaattttggtctggtgggaacagatgggaaccagctcaattgggtgtccactcaaagtgctctctccaggggcctcagtgactgtgttgctaaacccagtggtcagttctcagttctcagccatcagcagcatttgctcgccccgccttcttcctccactttcttcacttgcttccaggataccacgctttcttttctgaattgctacaatctttcttccttccttccttgcttccttccttccttccttccctctctccctccctccctccctcgcttcttcccttcctcctttcctcccttcctactttccttccttccttctgacagggtcttgctctattgctctgtcacccaggctggaatgcagtggcgagatctccgctcactgtagcctcctccccctgggttgaagcaattctcatgcctcagcctcccaagtagccaggactataggcacctgccaccatgcctggctaatttttgtattttttttctttctttctttcttttcttttttttttttttttgagacggagtctcactcttgttgcccaggctggacaacaatggcgcgatctcggctcactgcaacctccacctcccggattcaagcgattctcctgcctcagcctcctgagtagctggaactacatgcgcgtgccaccacgcacagctaatttttataattttagtagagatggggtttcactgcgttggccaggatgatctcgatctcttgaccttgggatccacccgccttggcctcccaaagtgctgggattacaggtgtgagccaccatgcctggccctaatttttgtgtttttattagaaacagagtttcaccatgttggccaggctggagaattgctgtaatagttttccaactggcccctgtccttcctctctcttgctctcctcccatctcatctgcacctagcagccagagtgatcctgatactctcggcctttacttccgcctccctcagagcagcagcctgtcaaaacaccagattacaacaaatttagtttaaaggtctcaattagcgttattggcaattctagaatcaggcaacagactcattgaatcaggaacagattcactccataaaatacagagagtgctgcaatgagctgggtagaagaggttagttttatagacaggaaggggctgtcaaaggcagaaagaaatgaagaacaaaaaaaaagattgatttttttttttttgagacaggatctcactctgtcatccaggctgaagtccaatcccacaatcatggctcactgcagccaccacctcctgagctcaagtgatcctcccatctaagcccccaagtagctaggactacaggagcacaccaccacacctggctaatttttgtattttttgtggagacagggtctcagtatgttacccaggttggactggaaacccttggctcaagcaatttgcctgcctcagcctcccaaagtgctgggattacaggcgtgagccactgcacagggccagattcatcatttcaaagttactttctatatgcggccggaacagggtggttgacatcagttttcttcaggttactttttaataatgattaaaacggggaacttcattatcaaaaaaaaaaaaaaaaaaa

SEQ ID NO: 159 - DNA, 755 bp, Homo sapiens
  ref <308>: DATABASE ACCESSION NUMBER: NCBI / NM_001009
  ref <309>: DATABASE ENTRY DATE: 2011-11-21
  ref <313>: RELEVANT RESIDUES IN SEQ ID NO: (1)..(755)
ctcttcctgtctgtaccagggcggcgcgtggtctacgccgagtgacagagacgctcaggctgtgttctcaggatgaccgagtgggagacagcagcaccagcggtggcagagaccccagacatcaagctctttgggaagtggagcaccgatgatgtgcagatcaatgacatttccctgcaggattacattgcagtgaaggagaagtatgccaagtacctgcctcacagtgcagggcggtatgccgccaaacgcttccgcaaagctcagtgtcccattgtggagcgcctcactaactccatgatgatgcacggccgcaacaacggcaagaagctcatgactgtgcgcatcgtcaagcatgccttcgagatcatacacctgctcacaggcgagaaccctctgcaggtcctggtgaacgccatcatcaacagtggtccccgggaggactccacacgcattgggcgcgccgggactgtgagacgacaggctgtggatgtgtcccccctgcgccgtgtgaaccaggccatctggctgctgtgcacaggcgctcgtgaggctgccttccggaacattaagaccattgctgagtgcctggcagatgagctcatcaatgctgccaagggctcctcgaactcctatgccattaagaagaaggacgagctggagcgtgtggccaagtccaaccgctgattttcccagctgctgcccaataaacctgtctgccctttggggcagtcccagccaaaaaaaaaaaaaaa

SEQ ID NO: 160 - DNA, 2358 bp, Homo sapiens
  ref <308>: DATABASE ACCESSION NUMBER: NCBI / NM_003021
  ref <309>: DATABASE ENTRY DATE: 2011-12-17
  ref <313>: RELEVANT RESIDUES IN SEQ ID NO: (1)..(2358)
gcagaagggaagcaactccgggcgcctttcttttgcgcaggcgtcgcgccctggggccggggccgggcggcaccgcggtgcgcaagcgcaaccgtcggtgggtcggggatcggtcgcctgagaggtatcacctcttctgggctcaagatggacaacaagaagcgcctggcctacgccatcatccagttcctgcatgaccagctccggcacgggggcctctcgtccgatgctcaggagagcttggaagtcgccatccagtgcctggagactgcgtttggggtgacggtagaagacagtgaccttgcgctccctcagactctgccggagatatttgaagcggctgccacgggcaaggagatgccgcaggacctgaggagccccgcgcgaaccccgccttccgaggaggactcagcagaggcagagcgcctcaaaaccgaaggaaacgagcagatgaaagtggaaaactttgaagctgccgtgcatttctacggaaaagccatcgagctcaacccagccaacgccgtctatttctgcaacagagccgcagcctacagcaaactcggcaactacgcaggcgcggtgcaggactgtgagcgggccatctgcattgacccggcctacagcaaggcctacggcaggatgggcctggcgctctccagcctcaacaagcacgtggaggccgtggcttactacaagaaggctctggagctggaccccgacaacgagacatacaagtccaacctcaagatagcggagctgaagctgcgggaggcccccagccccacgggaggcgtgggcagcttcgacatcgccggcctgctgaacaaccctggcttcatgagcatggcttcgaacctaatgaacaatccccagattcagcagctcatgtccggcatgatttcgggtggcaacaaccccttgggaactcccggcaccagcccctcgcagaacgacctggccagcctcatccaggcgggccagcagtttgcccagcagatgcagcagcagaacccagagttgatagagcagctcaggagccagatccggagtcggacgcccagcgccagcaacgacgaccagcaggagtgacgctgcctgctcccggtgtgaccgcgtccttccctggccgacccgaaggaagccttctggttgtctgccacttcctcctgttggactgcctgagagaggggaagagagagacctcggacctgcatgtcaagatggattttccccttttatctctgccctcctccactccctttttgtaactcccttacagcccccagacccttcttgaaacgagagccagcaagctgagcacagaccagcagcgacctcccttccagcccccagaaagctcggtcacttgagtgttttctagaatcctggggtgctcccgggccgctctcagagaagtggcaggtttcacgttcagccgtgtggcggatcgtgtggcttccaaagccttttacagcccccgccccccatcccgtggtctgtctgcaggaactctcccgtctgtgagaagcctctttccgagtcgacctcccggccaccccggccctgtgcctgctcggaagagctcactgccagctgcggcctgggcaccgcgggccatgtgtgtttgcatgaggaactctttagtggcagacacctaagagacggctgcggtcaccccacgcctccgcggctcaggagccgtcctgggtgcataggaccagtttctgtgacttttctccagttgggcatgttgacagacatgtttcccctcctcccaccctcattttctggtcctcgcgactgagagccaggggcgacatcatgaccttctgtcccggccgccttagccccgggcacagggaaggcagctgggccgtttctgtctgtgtcccatcctgctgtccttctgtcctggatgtttcatgggcccggggccccccagggaagcttacccctcctgtgctgggtggaggccacgggacacctcaggtgccacccaccttggccctaaaacagccaccaggaaagcagccggagagccggacagcaggcagcctgtctgggttcctgaggcctgggggtggcagacgagcccacggcgccgtggtcccagcagcagggttgtcagtcggagcatcctggggctccctggctcctggccgtctgtgaggtaggcgcagtaccgtgtatcgtaggtagcagtaggaacgggggccgccgcggccctgcagccgctcatggcggtgaggtgtgtgccaagcccacccggggtgcagggcgtgacgtgtggggaataaataggcgttgtgacctctaaaaaaaaaaaaaaaaaaaaaaaaaaaaaaaaaaaaaaaaaaa

SEQ ID NO: 161 - DNA, 9117 bp, Homo sapiens
  ref <308>: DATABASE ACCESSION NUMBER: NCBI / NM_004285
  ref <309>: DATABASE ENTRY DATE: 2011-11-21
  ref <313>: RELEVANT RESIDUES IN SEQ ID NO: (1)..(9117)
tgaggcctgaggcctggggcggggtggcggccgggctggccttggcctcgcgccttcccctgcggccgccgcgggctccgcgggcggtatcggagtgtcgtgcggcgcgtggccgcgtgacacgcgcacttgtcggagtgacgggccctgcggaagaggaggtgcggcccagggcgcaggggagccctcgggagcgggcccggccctcagcgccgccccggccgtgtcccggaggagcggcctgcgccgccgcgcgagaggaagcacccaggcatgtggaatatgctcatagtggcgatgtgcttggcccttctgggctgcctgcaagcccaggagctccagggacatgtctccataatcctgctgggagcaactggggacctggctaagaagtacttatggcagggactgttccagctgtacctggatgaagcggggaggggtcacagttttagcttccatggagctgctctgacagcccccaagcagggtcaagagctcatggccaaggccctggaatccctctcctgccccaaggacatggcacccagtcactgtgcagagcacaaggatcagttcctgcagctgagccagtaccgccaactgaagacggccgaggactatcaggccctgaacaaggacatcgaggcacagctccagcacgcaggcctccgggaggctggcaggatcttctacttctcagtgccacccttcgcctatgaagacattgcccgcaacatcaacagtagctgccggccaggcccgggcgcctggctgcgggttgtccttgagaaaccctttggccatgaccacttctcagcccagcagctggccacagaactcgggacctttttccaggaggaggagatgtaccgggtggaccattacttaggcaagcaggctgtggcgcagatcctgcctttccgagaccagaaccgcaaggctttggacggcctctggaaccggcaccatgtggagcgggtggagatcatcatgaaagagaccgtggatgctgaaggccgcaccagcttctatgaggagtacggtgtcattcgcgacgtcctccagaaccatctgacggaggtcctcaccctcgtggccatggagctgccccacaatgtcagcagtgcggaggctgtgctgcggcacaagcttcaggtcttccaggcgctgcggggcctgcagaggggcagtgccgtcgtgggccagtaccagtcttacagtgagcaggtgcgcagagagctgcagaagccagacagcttccacagcctgacgccgaccttcgcagccgtcctagtgcacattgacaaccttcgctgggagggcgtgcctttcatcctgatgtctggcaaagccttggacgagagagtgggctacgctcggatcttgttcaagaaccaggcctgctgtgtgcagagcgaaaagcactgggccgcggcgcagagccagtgcctgccccggcagctcgtcttccacatcggccatggcgacctgggcagccctgccgtgctggtcagcaggaacctgttcaggccctccctgccctccagctggaaggaaatggagggaccacctgggctccgccttttcggcagccctctgtccgattactacgcctacagccctgtgcgggagcgggacgcccactccgtcctcttatcccatatcttccatggccggaagaatttcttcatcaccacagagaacttgctggcctcctggaacttctggacccctctgctggagagcctggcccataaggccccacgcctctaccctggaggagctgagaatggccgtctgttggactttgagttcagtagcggccggttgttcttttcccagcagcagccggagcagctggtgccagggccagggccggccccaatgcccagtgacttccaggtcctcagggccaagtaccgagagagcccgctggtctccgcctggtccgaggagctgatctctaagctggctaatgacatcgaggccaccgctgtgcgagccgtgcggcgctttggccagttccacctggcactgtcggggggctcgagccccgtggccctgttccagcagctggccacggcgcactatggcttcccctgggcccacacgcacctgtggctggttgacgagcgctgcgtcccactctcagacccggagtccaacttccagggcctgcaggcccacctgctgcagcacgtccggatcccctactacaacatccaccccatgcctgtgcacctgcagcagcggctctgcgccgaggaggaccagggcgcccagatctatgccagggagatctcagccctggtggccaacagcagcttcgacctggtgctgctgggcatgggtgccgacgggcacacagcctccctcttcccacagtcacccactggcctggatggcgagcagctggtcgtgctgaccacgagcccctcccagccacaccgccgcatgagccttagcctgcctctcatcaaccgcgccaagaaggtggcagtcctggtcatgggcaggatgaagcgtgagatcaccacgctggtgagccgggtgggccatgagcccaagaagtggcccatctcgggtgtcctgccgcactccggccagctggtgtggtacatggactacgacgccttcctgggatgagggcgcctgtgccccttgcccgcttcgctcctgtgctttccttcgcccgtgtcttccctcccttctcggccccgccacctgcccagcgtgccctggctctccagaaccttctatcccacagtcaggccccagagagggcaggacaagccttgtcccgatgcctttgaccggcagctctgtgtattggtggatagatgcagaaacaaggaagaaatggagtctgctcctgagaagcttcaaattcaggccaggagagaagtcttaagaaaagacctccagcagttacacattcatatcaaccagcacaacacgggatggcgcccaaactccggcgttcacaagaggagacgtgacgtggtgggctgaggttaatcagggaaggtttcctgggggaggtgatccttgaactggctcccggggaacattcagagcatgattggtagacagaagggtgcagaggcgcccaggggagtacattgccccgtgcaaagcaggggcattggggactgtcttgagaccctgagggggtcaagcccctccttccccagctgcccctccttctagaacctctgcacatctagcctctggccctcctcttcactgcctccacctgctcccgcttgccatccctgtctcctccatcctggctgtgcagtaggaattccaggctcctccctgtgtctttgctgttcttcagactccatttatagagaatgagggctgataacaggaatacagtggcaaagactagactgtggaaagggttccagaaatcttttttcttttttaattaaaaaaaatatttgcagagatgagctcttgctatgttgcccaggctggtctcaaactcctgggctcaagcgatcctcccatctcagcctcccagagtgctgggattacaggtgtgagctactgcgcccagccccagaaatctcagtgctgtttggagctccatttctcatttgatgacttgctctgcgtggggaggtggggtctcattcccccaacttcctcagggaggacccctgccctccgctgctcctctgtcctgctagccttcctccaggaagcacactgggtgcagataatcaggacattccagagatccccaatttaagagggtcatttccatctcaggggactcccggatgggtgtttccgctctcaatagcccctcttgttttaccaggaaagatccagttaaatcacccactgaggtgacagctcattagcggggagagagatggagcatcgagtgacactgggccatccaggcggctctgctcccaccagacaggagctaggcctcactggcaggggggctgcccacagccttttcaggggctcgcttggcgggtgacggggccgcagccaggccttctctccctgccccttggtgaccccgtggcttcctgtctgctggcctctcctgctacttatcacttcaccacgaactctctgcctgagactggggaagtaagcgggtatcttctcagtgagcataggttggggactgtgatcttgagaagccatgggccagcaatacctgcttttctgaagcccccaaggagggctctgacattctttttaaaaacaccacaaagcaaaattcccaggacatgtgtagttttgtttgttcagtatcccacaacttaaggctgggagatggaactcttggttaaggtcgatttttctgtctggcttctccgcaccttccacttgctctctggatcaggcagatataaactttctagcgcattttgagagagggctttcttgggtgagggagcatggcaaagtcggtttctctctggactgtttacacttcaaggcggtggatttagaggaatcctggctttcattttcaatgccagtctgagacatgttcccaagccggggctcttgttcacaccacttactctggccaccaacaacaacccaggccagacagagcatctcttttttttttttttgagacagagtctctgtcgcccaggctggagcccagtggcgagatcttggctcactacaacctccacctcccgggttcaggcaattctcgtgcctaagcctcccgagtagctgcgactacaggcgccggccagcatgcctgtctaatttttgtattttagtagagacagggtttcaccatgttgcccaggctggtctcgaactcctgagctcaggcagtctacccacctcagcctcccaaagtgctgggattacaggcgtgagccaccgcgcccagccagaacatctgtttttacacccagagagcgcccctcgttaggacagaaccacggtgcccagagccaggaagccgccctcctggcgcccagcatctgagcttctacacgtgatgggcgggctcaggagaggacagggagtcgtggtggaagttccacagctggccgcgtgggggggcccttgcaccgcactgccgcctcctgactgcccctatccccgcagcccctgtgccggatttcatttccctcctctctcccagggtacctggccccagcactctcccatctgttcttcaggaaccgactcctctccagttgcaacaccagggagaaaggggcctccacatgcccaagtacccctgcaggatgaagggcaggccggcccttgatgtgccatttctgaataatagtcactgccgccgagtctaggatgtcctgttctaactcagccctgcctcggatgcaccaccgatctgtgcagagtgggtgtgggagtgtgggtgagggtcgaaatgccaaaggtctactttccagaatcaagtgccttctgcaaatcatgttggaaaagtccaaacctggagatgtccctgtgcctccgcccctacccaccccttttccttcagctgtgttaggaaggagaagttttcagaaccctctaggctggtggctttcaaacttcagaccatgatctgcagcaagaaacgtgccttccatcataaatcagtccatttgtttacaactgtgttccaagcaggtttcataaagaaattcttaaccttagaacctcggatatcctctatgttttagttttcatttttttaaaatgcttcttaaaattcactaaattgggctaggtgtggctcatgcctgtaatcccagcactatgggaggctgaggtgagaggatcacttgagcccagaaggttgaaaccagcctgggcaacatagtgagaccccatctctacaaaaagttttaaaaccaggtatggtggtgccctcctgtggtcccagctactcgggagtctgaggtgggaggatcacctgagcccaggagactgaggctgcagtaaggtgtgattgcactattgctctctagcctggaaaacagagtgagaccctatctcaaaaaaaaaaaaaaaaaaaaaggaaagagtgatgacaacagcccagggagcagccccgctcagaacccaagtcccaagttccagcactgtgttcccaggcaggctgtttgcctcttcctggtctggaagcccttgggtcctatggtggcggcagctcccacagtccaggttccctggtggggaccaatgattccatccgcatggaagcccacgtgtgcacttaggggcccataaatggcagaagggcccctcctttgggagaccttgtcagtcagcatctctagggcaaccgtgattgccatttgtagaggggaaggaatcaagggactttaagctagatcaaaatctggggacaaattctcctgctaactgcaagttaaaataggcccttcttactgaatttccctgtttgtttctctgcagacaatgctttagccctactcttgggcccccaagttagcagagtaatcaaagcttcctaccgtttggcctactattccagactagtccctcgaggggttcccttccaaaatatgcagggctcaggctcccaattccgggcctgtctgctttgcttgtgtttctcctgtccctgttctcccggagggcccaggtggaactcacgacagggagggagacgcttcccaaaaacctgcagggctatttcccagaatttggttttcaagtacaaaactttttgtcctgtaagatatatgcagcctcacagaagcagcctctgcctccactttaccagctacgtttttatcttaagcacatggggctcccttagaacttactccactgatttaaaaaaaaaaaactgcctggcagcatctcagtgtcagagtgagcacggcacaggaaaggcccgtggtgacgagggtgaggtggccacagtgaccggacgacaaatgagactctgcaaatgagactccagagggtgaagatctgcggtctccagacatcataggccatgtgacccactaggggccgcttacccctggccgtccgctggctgaactgaacgcattccctctctccgcaactctcccgtgaggctgcacccgtgtgggtagcactggaagcggcactgtttgcattgtacataggaaggaaggaagttcttccagcctcaccagcacctggcagcgagtcagagcctgtgagggcatccgaagcagtgatgcagtgtcaacctcccagctggtgccactctgccctcgggggctccaagcattgtaactcagtcatgggagctgcctctttggaagtgcagatttattcctgtaataatcctgcctgcttttacctctcgtccactgaccagcaagtgtgagtcccggtgtcagtcggcacagtccagtgtccatctgcatttgctcatgcagagggggtgagttgggcactccctgttgttggttttccttttgcagcacactgggcagtctccctataaaacaaaaaccccaccttctgtgccttctgctttagagcagagctccccctcccatttcctcagtcttccctgcaaaatctgtccaccggggaaggcagcaggaaccctgggcagcgggtgttctgggaaggctagtgacagcagatgtcatccaggaacagccacacacggttctccaggccgccgtcagcagctcaaggtggggtatgagtgagaagctgaggatctcgcagcttgttgctgagcaaggtgcaaccgggctcatgctgtcatcagcacaagacgggatggcaagggctttcagacgcatttccaagagtccagcaagccagggggaagatgatccctttgccgaagtgtaccctctagccaacttttgggagcgcttctgtttgcaaagcgctggggatgtgcctgtctctgtgtgacccacgaacgggaagggagagcactggagtaatgacacttctgctgctgctttgattctcaaggctgatctttaaaaccctcgccttgctgacaggtgctttaaaggcagtctgcatcttttcttcccttggtgtgggagaggtaaacactttgatttgctgaaagctgtatggagtatatttgaacagctagtagttagctttgaaagtggaagtgtgaacagacactacttgtgtcgctttgggtccttcactttacccccacagaagtctagaggcgtctgttataaagcgttacggggcgcctgcatgcaggaggaaggacctgtattagctggaaatcatcaggaacccagcttgcctccatctctctgagatgtgctgggtacagcctgcccctcctagttctgtccaccgggaagagccggctggcggcagatccccaggggcagagcccctgctggatcctgggagctcatctttacctgtgccggagtgggaactgtgattccagccgggcaggtcagagtggagcagtgctaagaggctgttgcaggagaactagacgggcggggcctgctgcatctggatcatgtttctgtgctctgccccgcgctagggactcagggtctgggcttctgccaggtgaggagcagagagactgttcccttgggtggagaggtgtgggcatgagagccacccattgccaagcagcaagaatgttcgtgcttttttccagagaggggaaccccactggtttttgtggaaacaatggaaacttacagatgcctgcctgggatgatgaggcacattcagaacaaatgcttttttttttttgagacagagtctcgctctgacgcccaggctggagtgcagtggcgcgatctcggctcactgcaaactttgcctcccaggttcaagtgattctcctacctcagcctcccgagtagctgggattacaccaccatgcccagcaaatttttgtgtttttagtagagacggagtttcaccatgttggccaggctggtctcgaactcctgacctcaggtgatccatccgccttggcctcccaaagtgctgggattacaggcgggagccaccatgcctggccagaacaaatgcctttttaaaccttttaagaacatttttaaaatgtctttttctatgtcaaatgtaacgtttatttttttaaacaataaaattgatttgccaaaa

SEQ ID NO: 162 - DNA, 1934 bp, Homo sapiens
  ref <308>: DATABASE ACCESSION NUMBER: NCBI / NM_004142
  ref <309>: DATABASE ENTRY DATE: 2006-09-17
  ref <313>: RELEVANT RESIDUES IN SEQ ID NO: (1)..(1934)
ggagaccggccgcatggacccagggacagtggccaccatgcgtaagccccgctgctccctgcctgacgtgctgggggtggcggggctggtcaggcggcgtcgccggtacgctctgagcggcagcgtgtggaagaagcgaaccctgacatggagggtacgttccttcccccagagctcccagctgagccaggagaccgtgcgggtcctcatgagctatgccctgatggcctggggcatggagtcaggcctcacatttcatgaggtggattccccccagggccaggagcccgacatcctcatcgactttgcccgcgccttccaccaggacagctaccccttcgacgggttggggggcaccctagcccatgccttcttccctggggagcaccccatctccggggacactcactttgacgatgaggagacctggacttttgggtcaaaagcctctcagcagctggagcaggagctggcaggcggctcaccggttgatgaggagctgggcttcagccggggctggcgtgtgaatcctctgggtcctggcagtcctgagcgcctgagctgaatacagagggaagaggctgggagcaaggccgggtgctggggccggcaggctgtgttctgagagtgcctgctagaggagctctgtgttcccaaggagatggaggaagacctggggtgggggtggtacagggtagggagaggaggggcagaggctgtgaacagggagatgggggaggggggatggaggactcaagggatgtaagggatatggcttgaggagggatgggggcaggaatgagggaaggtcttgggtcaaggacatggacctacatccccagcagatgggggtggcaagggggagacgggtgggggtcgctgactatagactgtagctgggaggaggggatgctcccagggctggggctgcctgaagagaatggcacgcaccttgtaggctcctgccctcaccccaccgccctcttaagtttcttttattttctttttctttttttttctttttactttttttgagacggggccttattctgtcctccaggctggagtgcaatgacatggtcatgcgtcactgcagcctccacctcccgggctccagcgattctcctgcctccctgcctcagcctgggacctgagtagctgggaccacaggcatgcgccaccactcctggccaatttttaaaatttttttgtagagatggggatctccttatgttgtccaggccagtcttgaactcttgggctcaagcgatcctcccacctgggactccaaaagtgctgggtttacaggcatgagccaccacacccagctcctccccctcaaacttctgtgcacaaagtgctcccttcccagaggaggggccccatcggtgtgtaaggtggcctattcctctgtgtgttctctggatcttttcagccctgtggtccagtgtccatcacagccatgctgactgagtgactggagacagggatgatggagagttcatgaagggctgggcagagagctggggccacctctggaggtgtcctgctgttcctgttggccccagctgcactcgcagggccttcctgtggcccctttccccaagcaggggcggccgcagctctcacccactttctcctgcagacggcgaggggaccgacctgtttgccgtggctgtccatgagtttggccacgccctgggcctgggccactcctcagcccccaactccattatgaggcccttctaccagggtccggtgggcgaccctgacaagtaccgcctgtctcaggatgaccgcgatggcctgcagcaactctatggtagggggagagggacctgccgcgaaaccatcattgccccatccagtgtcctctgcagcaaggccaggggacgcacacctgcctgactctttcctcacagggaaggcgcccc

SEQ ID NO: 163 - DNA, 2100 bp, Homo sapiens
  ref <308>: DATABASE ACCESSION NUMBER: NCBI / NM_001950
  ref <309>: DATABASE ENTRY DATE: 2011-12-24
  ref <313>: RELEVANT RESIDUES IN SEQ ID NO: (1)..(2100)
gcggaagtggcggcggcgccggcctggcctggcctggctgaggggaggcggcgggcgggcgcgatggcggaggccgggccacaggcgccgccgcccccgggcactccaagccggcacgaaaagagcctgggactgctcaccaccaagttcgtgtcccttctgcaggaggccaaggacggcgtgcttgacctcaagctggcagctgacaccctagctgtacgccagaagcggcggatttacgacattaccaatgttttggaaggtatcgggctaatcgagaaaaagtccaagaacagcatccagtggaagggtgtggggcctggctgcaatacccgggagattgctgacaaactgattgagctcaaggcagagatcgaggagctgcagcagcgggagcaagaactagaccagcacaaggtgtgggtgcagcagagcatccggaacgtcacagaggacgtgcagaacagctgtttggcctacgtcactcatgaggacatctgcagatgctttgctggagataccctcttggccatccgggccccatcaggcaccagcctggaggtgcccatcccagagggtctcaatgggcagaagaagtaccagattcacctgaagagtgtgagtggtcccattgaggttctgctggtgaacaaggaggcatggagctcaccccctgtggctgtgcctgtgccaccacctgaagatttgctccagagcccatctgctgtttctacacctccacctctgcccaagcctgccctagcccagtcccaggaagcctcacgtccaaatagtcctcagctcactcccactgctgtccctggcagtgcagaagtccagggaatggctggcccagcagctgagatcacagtgagtggcggccctgggactgatagcaaggacagtggtgagctcagttcactcccactgggcccaacaacactggacacccggccactgcagtcttctgccctgctggacagcagcagcagcagcagcagcagcagcagcagcagcagcaacagtaacagcagcagttcgtccggacccaacccttctacctcctttgagcccatcaaggcagaccccacaggtgttttggaactccccaaagagctgtcagaaatctttgatcccacacgagagtgcatgagctcggagctgctggaggagttgatgtcctcagaagtgtttgcccctctgcttcgtctttctccacccccgggagaccacgattatatctacaacctggacgagagtgaaggtgtctgtgacctctttgatgtgcctgttctcaacctctgactgacagggacatgccctgtgtggctgggacccagactgtctgacctgggggttgcctggggacctctcccacccgacccctacagagcttgagagccacagacgcctggcttctccggcctcccctcaccgcacagttctggccacagctcccgctcctgtgctggcacttctgtgctcgcagagcaggggaacaggactcagcccccatcaccgtggagccaaagtgtttgcttctccctttctgcggccttcgccagcccaggctcggctgccacccagtggcacagaaccgaggagctgccattaccccccatagggggcagtgtcttgttcctgccagcctcagtgtcttgcttctgccagctccttcccctaggagggaagggtggggtggaactgggcacatgccagcaccacttctagcttccttcgctatcccccaccccctgaccctccagctcctcctggccctctcacgtgcccacttctgctgggcctttagccctagaacctgcaggtggtgggggcggctaccaagaaggaacagaggtctctggggaggagtctgggtggtccagccctgatgattggccccacctcctgctgccccataaccctctcttcatttcggctttttcatttaccctcatttagagccatttgcagagatttagaaagatttacagtaacgaatggattcctatataaagattatttttatactttttgcagcaaaaggaaattgtaatatttgtacagtgttcaagtgaataaaaaccatgcctaaggcta

SEQ ID NO: 164 - DNA, 2823 bp, Homo sapiens
  ref <308>: DATABASE ACCESSION NUMBER: NCBI / NM_003815
  ref <309>: DATABASE ENTRY DATE: 2011-11-19
  ref <313>: RELEVANT RESIDUES IN SEQ ID NO: (1)..(2823)
gcgcggcgctgctgggttctccgaggcgacctggccgccggccgctcctccgcgcgctgttccgcacttgctgccctcgcccggcccggagcgccgctgccatgcggctggcgctgctctgggccctggggctcctgggcgcgggcagccctctgccttcctggccgctcccaaatataggtggcactgaggagcagcaggcagagtcagagaaggccccgagggagcccttggagccccaggtccttcaggacgatctcccaattagcctcaaaaaggtgcttcagaccagtctgcctgagcccctgaggatcaagttggagctggacggtgacagtcatatcctggagctgctacagaatagggagttggtcccaggccgcccaaccctggtgtggtaccagcccgatggcactcgggtggtcagtgagggacacactttggagaactgctgctaccagggaagagtgcggggatatgcaggctcctgggtgtccatctgcacctgctctgggctcagaggcttggtggtcctgaccccagagagaagctataccctggagcaggggcctggggaccttcagggtcctcccattatttcgcgaatccaagatctccacctgccaggccacacctgtgccctgagctggcgggaatctgtacacactcagaagccaccagagcaccccctgggacagcgccacattcgccggaggcgggatgtggtaacagagaccaagactgtggagttggtgattgtggctgatcactcggaggcccagaaataccgggacttccagcacctgctaaaccgcacactggaagtggccctcttgctggacacattcttccggcccctgaatgtacgagtggcactagtgggcctggaggcctggacccagcgtgacctggtggagatcagcccaaacccagctgtcaccctcgaaaacttcctccactggcgcagggcacatttgctgcctcgattgccccatgacagtgcccagctggtgactggtacttcattctctgggcctacggtgggcatggccattcagaactccatctgttctcctgacttctcaggaggtgtgaacatggaccactccaccagcatcctgggagtcgcctcctccatagcccatgagttgggccacagcctgggcctggaccatgatttgcctgggaatagctgcccctgtccaggtccagccccagccaagacctgcatcatggaggcctccacagacttcctaccaggcctgaacttcagcaactgcagccgacgggccctggagaaagccctcctggatggaatgggcagctgcctcttcgaacggctgcctagcctaccccctatggctgctttctgcggaaatatgtttgtggagccgggcgagcagtgtgactgtggcttcctggatgactgcgtcgatccctgctgtgattctttgacctgccagctgaggccaggtgcacagtgtgcatctgacggaccctgttgtcaaaattgccagctgcgcccgtctggctggcagtgtcgtcctaccagaggggattgtgacttgcctgaattctgcccaggagacagctcccagtgtccccctgatgtcagcctaggggatggcgagccctgcgctggcgggcaagctgtgtgcatgcacgggcgttgtgcctcctatgcccagcagtgccagtcactttggggacctggagcccagcccgctgcgccactttgcctccagacagctaatactcggggaaatgcttttgggagctgtgggcgcaaccccagtggcagttatgtgtcctgcacccctagagatgccatttgtgggcagctccagtgccagacaggtaggacccagcctctgctgggctccatccgggatctactctgggagacaatagatgtgaatgggactgagctgaactgcagctgggtgcacctggacctgggcagtgatgtggcccagcccctcctgactctgcctggcacagcctgtggccctggcctggtgtgtatagaccatcgatgccagcgtgtggatctcctgggggcacaggaatgtcgaagcaaatgccatggacatggggtctgtgacagcaacaggcactgctactgtgaggagggctgggcaccccctgactgcaccactcagctcaaagcaaccagctccctgaccacagggctgctcctcagcctcctggtcttattggtcctggtgatgcttggtgccagctactggtaccgtgcccgcctgcaccagcgactctgccagctcaagggacccacctgccagtacagggcagcccaatctggtccctctgaacggccaggacctccgcagagggccctgctggcacgaggcactaagtctcaggggccagccaagcccccacccccaaggaagccactgcctgccgacccccagggccggtgcccatcgggtgacctgcccggcccaggggctggaatcccgcccctagtggtaccctccagaccagcgccaccgcctccgacagtgtcctcgctctacctctgacctctccggaggttccgctgcctccaagccggacttagggcttcaagaggcgggcgtgccctctggagtcccctaccatgactgaaggcgccagagactggcggtgtcttaagactccgggcaccgccacgcgctgtcaagcaacactctgcggacctgccggcgtagttgcagcgggggcttggggaggggctgggggttggacgggattgaggaaggtccgcacagcctgtctctgctcagttgcaataaacgtgacatcttgggagcgttcaaa

SEQ ID NO: 165 - DNA, 3970 bp, Homo sapiens
  ref <308>: DATABASE ACCESSION NUMBER: NCBI / NM_001119
  ref <309>: DATABASE ENTRY DATE: 2011-11-28
  ref <313>: RELEVANT RESIDUES IN SEQ ID NO: (1)..(3970)
gcacccaggtcgggcggtgggggcgagcggaggggctgaggggcggagaggcctggcgggccgctgctgcgggccaggggacgggggcggagccggagccggagccgacgggcggtggccgcactgggaccccggaatcccgcgcgctgcccacgattcgcttctgaggaacctagaaagattgtacaatgaatggtgattctcgtgctgcggtggtgacctcaccacccccgaccacagcccctcacaaggagaggtacttcgaccgagtagatgagaacaacccagagtacttgagggagaggaacatggcaccagaccttcgccaggacttcaacatgatggagcaaaagaagagggtgtccatgattctgcaaagccctgctttctgtgaagaattggaatcaatgatacaggagcaatttaagaaggggaagaaccccacaggcctattggcattacagcagattgcagattttatgaccacgaatgtaccaaatgtctacccagcagctccgcaaggagggatggctgccttaaacatgagtcttggtatggtgactcctgtgaacgatcttagaggatctgattctattgcgtatgacaaaggagagaagttattacggtgtaaattggcagcgttttatagactagcagatctctttgggtggtctcagcttatctacaatcatatcacaaccagagtgaactccgagcaggaacacttcctcattgtcccttttgggcttctttacagtgaagtgactgcatccagtttggttaagatcaatctacaaggagatatagtagatcgtggaagcactaatctgggagtgaatcaggccggcttcaccttacactctgcaatttatgctgcacgcccggacgtgaagtgcgtcgtgcacattcacaccccagcaggggctgcggtctctgcaatgaaatgtggcctcttgccaatctccccggaggcgctttcccttggagaagtggcttatcatgactaccatggcattctggttgatgaagaggaaaaagttttgattcagaaaaatctggggcctaaaagcaaggttcttattctccggaaccatgggctcgtgtcagttggagagagcgttgaggaggccttctattacatccataaccttgtggttgcctgtgagatccaggttcgaactctggccagtgcaggaggaccagacaacttagtcctgctgaatcctgagaagtacaaagccaagtcccgttccccagggtctccggtaggggaaggcactggatcgcctcccaagtggcagattggtgagcaggaatttgaagccctcatgcggatgctcgataatctgggctacagaactggctacccttatcgataccctgctctgagagagaagtctaaaaaatacagcgatgtggaggttcctgctagtgtcacaggttactcctttgctagtgacggtgattcgggcacttgctccccactcagacacagttttcagaagcagcagcgggagaagacaagatggctgaactctggccggggcgacgaagcttccgaggaagggcagaatggaagcagtcccaagtcgaagactaagtggactaaagaggatggacatagaacttccacctctgctgtccctaacctgtttgttccattgaacactaacccaaaagaggtccaggagatgaggaacaagatccgagagcagaatttacaggacattaagacggctggccctcagtcccaggttttgtgtggtgtagtgatggacaggagcctcgtccagggagagctggtgacggcctccaaggccatcattgaaaaggagtaccagccccacgtcattgtgagcaccacgggccccaaccccttcaccacactcacagaccgtgagctggaggagtaccgcagggaggtggagaggaagcagaagggctctgaagagaatctggacgaggctagagaacagaaagaaaagagtcctccagaccagcctgcggtcccccacccgcctcccagcactcccatcaagctggaggaagaccttgtgccggagccgactactggagatgacagtgatgctgccacctttaagccaactctccccgatctgtcccctgatgaaccttcagaagcactcggcttcccaatgttagagaaggaggaggaagcccatagacccccaagccccactgaggcccctactgaggccagccccgagccagccccagacccagccccggtggctgaagaggctgccccctcagctgtcgaggagggggccgccgcggaccctggcagcgatgggtctccaggcaagtccccgtccaaaaagaagaagaagttccgtaccccgtcctttctgaagaagagcaagaagaagagtgactcctgaaagccctgcgctaacactgtcctgtccggagcgaccctggctctgccagcgtccccggccacgtctgtgctctgtccttgtgtaatggaatgcaaaaaagccaagccctccgcctagaggtcccctcacgtgaccagccccgtgtagccccgggctgacccagtgtgtgctcagcagccccaccccaccctgccccttgtcctctcagagcctcagcttctgggggagacatgctctccccacaggggggaggcactaagtcatggtcctggctggaaggtactgaaggcttctgcagctttggctgcacgtcaccctcctgagcctcacctttcctgccgtccctcctgttgtgaaatcaccacattctgtctctgcttggcttcccctccaccctaaagtctcaggtgacggactcagactcctggcttcatgtggcattctctctgctcagtgatctcacttaaatctatatacaaagccttggtcccgtgaaaacactcgtgtgcccaccagcggccttgaagaggcaggtctgggccagatgctgggcaggaaaccccagcggcagatgggcctgtgtgcacccaacgtgatgctatgcatgtctgaccgacgatccctcgaccagaatcagattcaggagctcagtttctttttcacttgggtctctggattcctgtcatagggaaggtatatcaggaggggaagaggcctttctagaattttctttgagcaggtttacaatttagcttacatttttcgactgtgaacgtgaataggctgctttttgctttcttctttccagaccccacagtagagcacttttcacttatttgggggaggcttcaggggactgttctcaccttaactcagccagaaagatgccctagttgtgatcaaaggtaactcgaggtggagggtagccctggggcccctcgacatcaccgtcattgatggagcctgaaccgtgtgctcctcggcagatgctgttgttgttacttccctccaagaggctggaaaagggctcagagctgctgagcaggaaccggagggtgacccatttcaggaggtgccggtaccagcctgactaggtacaggcaagcttgtgtgggcccaacaggcccttggtagagctggtgccagatgtgggctcagatcctgggcatgatgggccgagccacctcggatcccactgattggccagccgagcgagaaccaggctgctgcatggcactgaccgccgcttccagcttcctctgagccgcagggcctgctacgcgggcaagcgtgctgcctctcttctgtgtcgttttgttgccaaggcagaatgaaaagtccttaaccgtggactcttcctttatcccctcctttaccccacatatgcaatgacttttaattttcacttttgtagtttaatcctttgtattacaacatgaaatatagttgcatatatggacaccgacttgggaggacaggtcctgaatgtcctttctccagtgtaacatgttttactcacaaataaaattctttcagcaagttccttgtctaaaaaaaaaaaaaaaaaa

SEQ ID NO: 166 - DNA, 6692 bp, Homo sapiens
  ref <308>: DATABASE ACCESSION NUMBER: NCBI / NM_001111
  ref <309>: DATABASE ENTRY DATE: 2011-12-24
  ref <313>: RELEVANT RESIDUES IN SEQ ID NO: (1)..(6692)
gcccctcctcttggccaaactttccggaggggaaggctttccgaggaaacgaaagcgaaattgaaccggagccatcttgggcccggcgcgcagacccgcggagtttcccgtgccgacgccccggggccacttccagtgcggagtagcggaggcgtgggggcctcgaggggctggcgcggcccagcggtcgggccagggtcgtgccgccggcgggtcgggccgggcaatgcctcgcgggcgcaatgaatccgcggcaggggtattccctcagcggatactacacccatccatttcaaggctatgagcacagacagctcaggtaccagcagcctgggccaggatcttcccccagtagtttcctgcttaagcaaatagaatttctcaaggggcagctcccagaagcaccggtgattggaaagcagacaccgtcactgccaccttccctcccaggactccggccaaggtttccagtactacttgcctccagtaccagaggcaggcaagtggacatcaggggtgtccccaggggcgtgcatctcggaagtcaggggctccagagagggttccagcatccttcaccacgtggcaggagtctgccacagagaggtgttgattgcctttcctcacatttccaggaactgagtatctaccaagatcaggaacaaaggatcttaaagttcctggaagagcttggggaagggaaggccaccacagcacatgatctgtctgggaaacttgggactccgaagaaagaaatcaatcgagttttatactccctggcaaagaagggcaagctacagaaagaggcaggaacaccccctttgtggaaaatcgcggtctccactcaggcttggaaccagcacagcggagtggtaagaccagacggtcatagccaaggagccccaaactcagacccgagtttggaaccggaagacagaaactccacatctgtctcagaagatcttcttgagccttttattgcagtctcagctcaggcttggaaccagcacagcggagtggtaagaccagacagtcatagccaaggatccccaaactcagacccaggtttggaacctgaagacagcaactccacatctgccttggaagatcctcttgagtttttagacatggccgagatcaaggagaaaatctgcgactatctcttcaatgtgtctgactcctctgccctgaatttggctaaaaatattggccttaccaaggcccgagatataaatgctgtgctaattgacatggaaaggcagggggatgtctatagacaagggacaacccctcccatatggcatttgacagacaagaagcgagagaggatgcaaatcaagagaaatacgaacagtgttcctgaaaccgctccagctgcaatccctgagaccaaaagaaacgcagagttcctcacctgtaatatacccacatcaaatgcctcaaataacatggtaaccacagaaaaagtggagaatgggcaggaacctgtcataaagttagaaaacaggcaagaggccagaccagaaccagcaagactgaaaccacctgttcattacaatggcccctcaaaagcagggtatgttgactttgaaaatggccagtgggccacagatgacatcccagatgacttgaatagtatccgcgcagcaccaggtgagtttcgagccatcatggagatgccctccttctacagtcatggcttgccacggtgttcaccctacaagaaactgacagagtgccagctgaagaaccccatcagcgggctgttagaatatgcccagttcgctagtcaaacctgtgagttcaacatgatagagcagagtggaccaccccatgaacctcgatttaaattccaggttgtcatcaatggccgagagtttcccccagctgaagctggaagcaagaaagtggccaagcaggatgcagctatgaaagccatgacaattctgctagaggaagccaaagccaaggacagtggaaaatcagaagaatcatcccactattccacagagaaagaatcagagaagactgcagagtcccagacccccaccccttcagccacatccttcttttctgggaagagccccgtcaccacactgcttgagtgtatgcacaaattggggaactcctgcgaattccgtctcctgtccaaagaaggccctgcccatgaacccaagttccaatactgtgttgcagtgggagcccaaactttccccagtgtgagtgctcccagcaagaaagtggcaaagcagatggccgcagaggaagccatgaaggccctgcatggggaggcgaccaactccatggcttctgataaccagcctgaaggtatgatctcagagtcacttgataacttggaatccatgatgcccaacaaggtcaggaagattggcgagctcgtgagatacctgaacaccaaccctgtgggtggccttttggagtacgcccgctcccatggctttgctgctgaattcaagttggtcgaccagtccggacctcctcacgagcccaagttcgtttaccaagcaaaagttgggggtcgctggttcccagccgtctgcgcacacagcaagaagcaaggcaagcaggaagcagcagatgcggctctccgtgtcttgattggggagaacgagaaggcagaacgcatgggtttcacagaggtaaccccagtgacaggggccagtctcagaagaactatgctcctcctctcaaggtccccagaagcacagccaaagacactccctctcactggcagcaccttccatgaccagatagccatgctgagccaccggtgcttcaacactctgactaacagcttccagccctccttgctcggccgcaagattctggccgccatcattatgaaaaaagactctgaggacatgggtgtcgtcgtcagcttgggaacagggaatcgctgtgtgaaaggagattctctcagcctaaaaggagaaactgtcaatgactgccatgcagaaataatctcccggagaggcttcatcaggtttctctacagtgagttaatgaaatacaactcccagactgcgaaggatagtatatttgaacctgctaagggaggagaaaagctccaaataaaaaagactgtgtcattccatctgtatatcagcactgctccgtgtggagatggcgccctctttgacaagtcctgcagcgaccgtgctatggaaagcacagaatcccgccactaccctgtcttcgagaatcccaaacaaggaaagctccgcaccaaggtggagaacggagaaggcacaatccctgtggaatccagtgacattgtgcctacgtgggatggcattcggctcggggagagactccgtaccatgtcctgtagtgacaaaatcctacgctggaacgtgctgggcctgcaaggggcactgttgacccacttcctgcagcccatttatctcaaatctgtcacattgggttaccttttcagccaagggcatctgacccgtgctatttgctgtcgtgtgacaagagatgggagtgcatttgaggatggactacgacatccctttattgtcaaccaccccaaggttggcagagtcagcatatatgattccaaaaggcaatccgggaagactaaggagacaagcgtcaactggtgtctggctgatggctatgacctggagatcctggacggtaccagaggcactgtggatgggccacggaatgaattgtcccgggtctccaaaaagaacatttttcttctatttaagaagctctgctccttccgttaccgcagggatctactgagactctcctatggtgaggccaagaaagctgcccgtgactacgagacggccaagaactacttcaaaaaaggcctgaaggatatgggctatgggaactggattagcaaaccccaggaggaaaagaacttttatctctgcccagtatagtatgctccagtgacagatggattagggtgtgtcatactagggtgtgagagaggtaggtcgtagcattcctcatcacatggtcaggggatttttttttctcctttttttttctttttaagccataattggtgatactgaaaactttgggttcccatttatcctgctttctttgggattgctaggcaaggtctggccaggccccccttttttcccccaagtgaagaggcagaaacctaagaagttatcttttctttctacccaaagcatacatagtcactgagcacctgcggtccatttcctcttaaaagttttgttttgatttgtttccatttcctttccctttgtgtttgctacactgacctcttgcggtcttgattaggtttcagtcaactctggatcatgtcagggactgataatttcatttgtggattacgcagacccctctacttcccctctttcccttctgagattctttccttgtgatctgaatgtctccttttccccctcagagggcaaagaggtgaacataaaggatttggtgaaacatttgtaagggtaggagttgaaaactgcagttcccagtgccacggaagtgtgattggagcctgcagataatgcccagccatcctcccatcctgcactttagccagctgcagggcgggcaaggcaaggaaagctgcttccctggaagtgtatcactttctccggcagctgggaagtctagaaccagccagactgggttaagggagctgctcaagcaatagcagaggtttcacccggcaggatgacacagaccacttcccagggagcacgggcatgccttggaatattgccaagcttccagctgcctcttctcctaaagcattcctaggaatattttccccgccaatgctgggcgtacaccctagccaacgggacaaatcctagagggtataaaatcatctctgctcagataatcatgacttagcaagaataagggcaaaaaatcctgttggcttaacgtcactgttccacccggtgtaatatctctcatgacagtgacaccaagggaagttgactaagtcacatgtaaattaggagtgttttaaagaatgccatagatgttgattcttaactgctacagataacctgtaattgagcagatttaaaattcaggcatacttttccatttatccaagtgctttcatttttccagatggcttcagaagtaggctcgtgggcagggcgcagacctgatctttatagggttgacatagaaagcagtagttgtgggtgaaagggcaggttgtcttcaaactctgtgaggtagaatcctttgtctatacctccatgaacattgactcgtgtgttcagagcctttggcctctctgtggagtctggctctctggctcctgtgcattctttgaatagtcactcgtaaaaactgtcagtgcttgaaactgtttcctttactcatgttgaagggactttgttggcttttagagtgttggtcatgactccaagagcagagcagggaagagcccaagcatagacttggtgccgtggtgatggctgcagtccagttttgtgatgctgcttttacgtgtccctcgataacagtcagctagacacactcaggaggactactgaggctctgcgaccttcaggagctgagcctgcctctctcctttagatgacagaccttcatctgggaacgtgctgagccagcaccctcagatgatttccctccaaactgctgactaggtcatcctctgtctggtagagacattcacatctttgcttttattctatgctctctgtacttttgaccaaaaattgaccaaagtaagaaaatgcaagttctaaaaatagactaaggatgcctttgcagaacaccaaagcatcccaaggaactggtagggaagtggcgcctgtctcctggagtggaagaggcctgctccctggctctgggtctgctgggggcacagtaaatcagtcttggcacccacatccagggcagagaggtctgtggttctcagcatcagaaggcagcgcagcccctctcctcttcaggctacagggttgtcacctgctgagtcctcaggttgtttggcctctctggtccatcttgggcattaggttctccagcagagctctggccagctgcctcttctttaactgggaacacaggctctcacaagatcagaacccccactcacccccaagatcttatctagcaagcctgtagtattcagtttctgttgtaggaagagagcgaggcatccctgaattccacgcatctgctggaaacgagccgtgtcagatcgcacatccctgcgcccccatgcccctctgagtcacacaggacagaggaggcagagcttctgcccactgttatcttcactttctttgtccagtcttttgtttttaataagcagtgaccctccctactcttctttttaatgatttttgtagttgatttgtctgaactgtggctactgtgcattccttgaataatcacttgtaaaaattgtcagtgcttgaagctgtttcctttactcacattgaagggacttcgttggttttttggagtcttggttgtgactccaagagcagagtgaggaagacccccaagcatagactcgggtactgtgatgatggctgcagtccagttttatgattctgcttttatgtgtcccttgataacagtgacttaacaatatacattcctcataaataaaaaaaaaacaagaatctgaattcttagaaaaaaaaaaaaaaaaaaaaaaa

SEQ ID NO: 167 - DNA, 4065 bp, Homo sapiens
  ref <308>: DATABASE ACCESSION NUMBER: NCBI / NM_003466
  ref <309>: DATABASE ENTRY DATE: 2011-11-13
  ref <313>: RELEVANT RESIDUES IN SEQ ID NO: (1)..(4065)
gggaacaaacttcagaaggaggagagacaccgggcccagggcaccctcgcgggcggacccaagcagtgagggcctgcagccggccggccagggcagcggcaggcgcggcccggacctacgggaggaagccccgagccctcggcgggctgcgagcgactccccggcgatgcctcacaactccatcagatctggccatggagggctgaaccagctgggaggggcctttgtgaatggcagacctctgccggaagtggtccgccagcgcatcgtagacctggcccaccagggtgtaaggccctgcgacatctctcgccagctccgcgtcagccatggctgcgtcagcaagatccttggcaggtactacgagactggcagcatccggcctggagtgatagggggctccaagcccaaggtggccacccccaaggtggtggagaagattggggactacaaacgccagaaccctaccatgtttgcctgggagatccgagaccggctcctggctgagggcgtctgtgacaatgacactgtgcccagtgtcagctccattaatagaatcatccggaccaaagtgcagcaaccattcaacctccctatggacagctgcgtggccaccaagtccctgagtcccggacacacgctgatccccagctcagctgtaactcccccggagtcaccccagtcggattccctgggctccacctactccatcaatgggctcctgggcatcgctcagcctggcagcgacaagaggaaaatggatgacagtgatcaggatagctgccgactaagcattgactcacagagcagcagcagcggaccccgaaagcaccttcgcacggatgccttcagccagcaccacctcgagccgctcgagtgcccatttgagcggcagcactacccagaggcctatgcctcccccagccacaccaaaggcgagcagggcctctacccgctgcccttgctcaacagcaccctggacgacgggaaggccaccctgaccccttccaacacgccactggggcgcaacctctcgactcaccagacctaccccgtggtggcagatcctcactcacccttcgccataaagcaggaaacccccgaggtgtccagttctagctccaccccttcctctttatctagctccgcctttttggatctgcagcaagtcggctccggggtcccgcccttcaatgcctttccccatgctgcctccgtgtacgggcagttcacgggccaggccctcctctcagggcgagagatggtggggcccacgctgcccggatacccaccccacatccccaccagcggacagggcagctatgcctcctctgccatcgcaggcatggtggcaggaagtgaatactctggcaatgcctatggccacaccccctactcctcctacagcgaggcctggcgcttccccaactccagcttgctgagttccccatattattacagttccacatcaaggccgagtgcaccgcccaccactgccacggcctttgaccatctgtagttgccatggggacagtgggagcgactgagcaacaggaggactcagcctgggacaggccccagagagtcacacaaaggaatctttatttattacatgaaaaataaccacaagtccagcattgcggcacactccctgtgtggttaatttaatgaaccatgaaagacaggatgaccttggacaaggccaaactgtcctccaagactccttaatgaggggcaggagtcccagggaaagagaaccatgccatgctgaaaaagacaaaattgaagaagaaatgtagcccccagccggtacccaccaaaggagagaagaagcaatagccgaggaacttggggggatggcgaatggttcctgcccgggcccaaggggtgcacagggcacctccatggctccattattaacacaactctagcaattatggaccataagcacttccctccagcccacaagtcacagcctggtgccgaggctctcctcaccagccacccagggagtcacctccctcagcctcccgcctgccccacacggaggctctggctgtcctctttctccactccatttgcttggctctttctacacctccctcttgggcatgggctgagggctggagcgagtccctcagaaattccaccaggctgtcagctgacctcttttgcctgctgctgtgaaggtatagcaccaccccaggtcctcctgcagtgcggcatccccttggcagctgccgtcagccaggccagccccagggagcttaaaacagacattccacagggcctgggcccctgggaggtgaggtgtggtgtgcggcttcacccagggcagaacaaggcagaatcgcaggaaacccgcttccccttcctgacagctcctgccaagccaaatgtgcttcctgcagctcacgcccaccagctactgaagggacccaaggcaccccctgaagccagcgatagagggtccctctctgctccccagcagctcctgcccccaaggcctgactgtatatactgtaaatgaaactttgtttgggtcaagcttccttctttctaacccccagactttggcctctgagtgaaatgtctctctttgccctgtggggcttctctccttgatgcttctttctttttttaaagacaacctgccattaccacatgactcaataaaccattgctcttcatctcaggctttggggttggctggggaaggaggcatcccggggctgggctttctcccaagaacatcagagctgagtagccgacaaactcactttggggccgtgggctggaagggaccatctgatgccccagagctctggcttggccttctccctctgcctttaattcacgttgaacgctgggtacctcactcatcccaagttcttcaacactgagcaaatgcaaggatagcacagtactgagccaaccatagactccccacaaggagttgctgttgttattaacaggaagccagagaatcagcagggtgggttagtgagggatccgggaatagctgtgactggagcctgcataaacagctctgaagggagagagaagactgggctctcttgtgtgccaggcacagtatggaaggcttcatataagttaagctgaaattagccctgttttacatacagcttcattttacatatgaggaaactgaggctttgaaaaaaatgagatgtcttgtccaagatgaaaagtagtagattcaaccaagtcctcttactctaagcccaacgcttttacccaaaaccccagagtcctcatcagggatgccaaatggttctagacccagtggaggttctggagctgccactggggatttaatttcttttgatttgctaaagatttgacctgactgaatggagaggtagagtgtagtgtggccaggacaaggtgagggaggctgtagagacttagcactttaggccaaccacctccaggaaatctgggaaatgcaatgtgacagctcgggctctgcactccagggggctgtctggtgtccacatggaccttctccatgtgggacacagctggaacaagggggcaggggcctgcagctgggatgcccaggtgaatatgggcagctggacaaacaacactgggattgagtcagatagaaggggcccaaggactccagggctgggaggacagaggctgggagagagggctcttacctccttaggcctcccaaagagcggttagggatgctgccatggatggcatggcagggggaaccctcctggaagaaaatccatctcttctgaagggatctgagatgcggctggtttttcaatggcagaacttccctctgcagcgcgactccgaatccatgacatctgagagtcttcctgaccacaaacctctgggatcccgagggctccctacccaagaatcactttgagcacagcatcccaaggagcccatagagcgatcccttgcattcacagccacagcccctctggggacactctgtacccccggcagaccctttccaactcacaaccaataaaggggcttgggctgtgctttgactaaggtgaaaaaaaaaaa

SEQ ID NO: 168 - DNA, 3002 bp, Homo sapiens
  ref <308>: DATABASE ACCESSION NUMBER: NCBI / NM_001155
  ref <309>: DATABASE ENTRY DATE: 2011-12-25
  ref <313>: RELEVANT RESIDUES IN SEQ ID NO: (1)..(3002)
agaggggtggggtggaggagggaggcgggcgcgccggattggcctctgcgcgccacgtgtccggctcggagcccacggctgtcctcccggtccgccccgcgctgcggttgctgctgggctaacgggctccgatccagcgagcgctgcgtcctcgagtccctgcgcccgtgcgtccgtctgcgacccgaggcctccgctgcgcgtggattctgctgcgaaccggagaccatggccaaaccagcacagggtgccaagtaccggggctccatccatgacttcccaggctttgaccccaaccaggatgccgaggctctgtacactgccatgaagggctttggcagtgacaaggaggccatactggacataatcacctcacggagcaacaggcagaggcaggaggtctgccagagctacaagtccctctacggcaaggacctcattgctgatttaaagtatgaattgacgggcaagtttgaacggttgattgtgggcctgatgaggccacctgcctattgtgatgccaaagaaattaaagatgccatctcgggcattggcactgatgagaagtgcctcattgagatcttggcttcccggaccaatgagcagatgcaccagctggtggcagcatacaaagatgcctacgagcgggacctggaggctgacatcatcggcgacacctctggccacttccagaagatgcttgtggtcctgctccagggaaccagggaggaggatgacgtagtgagcgaggacctggtacaacaggatgtccaggacctatacgaggcaggggaactgaaatggggaacagatgaagcccagttcatttacatcttgggaaatcgcagcaagcagcatcttcggttggtgttcgatgagtatctgaagaccacagggaagccgattgaagccagcatccgaggggagctgtctggggactttgagaagctaatgctggccgtagtgaagtgtatccggagcaccccggaatattttgctgaaaggctcttcaaggctatgaagggcctggggactcgggacaacaccctgatccgcatcatggtctcccgtagtgagttggacatgctcgacattcgggagatcttccggaccaagtatgagaagtccctctacagcatgatcaagaatgacacctctggcgagtacaagaagactctgctgaagctgtctgggggagatgatgatgctgctggccagttcttcccggaggcagcgcaggtggcctatcagatgtgggaacttagtgcagtggcccgagtagagctgaagggaactgtgcgcccagccaatgacttcaaccctgacgcagatgccaaagcgctgcggaaagccatgaagggactcgggactgacgaagacacaatcatcgatatcatcacgcaccgcagcaatgtccagcggcagcagatccggcagaccttcaagtctcactttggccgggacttaatgactgacctgaagtctgagatctctggagacctggcaaggctgattctggggctcatgatgccaccggcccattacgatgccaagcagttgaagaaggccatggagggagccggcacagatgaaaaggctcttattgaaatcctggccactcggaccaatgctgaaatccgggccatcaatgaggcctataaggaggactatcacaagtccctggaggatgctctgagctcagacacatctggccacttcaggaggatcctcatttctctggccacggggcatcgtgaggagggaggagaaaacctggaccaggcacgggaagatgcccaggtggctgctgagatcttggaaatagcagacacacctagtggagacaaaacttccttggagacacgtttcatgacgatcctgtgtacccggagctatccgcacctccggagagtcttccaggagttcatcaagatgaccaactatgacgtggagcacaccatcaagaaggagatgtctggggatgtcagggatgcatttgtggccattgttcaaagtgtcaagaacaagcctctcttctttgccgacaaactttacaaatccatgaagggtgctggcacagatgagaagactctgaccaggatcatggtatcccgcagtgagattgacctgctcaacatccggagggaattcattgagaaatatgacaagtctctccaccaagccattgagggtgacacctccggagacttcctgaaggccttgctggctctctgtggtggtgaggactagggccacagctttggcgggcacttctgccaagaaatggttatcagcaccagccgccatggccaagcctgattgttccagctccagagactaaggaaggggcaggggtggggggaggggttgggttgggctcttatcttcagtggagcttaggaaacgctcccactcccacgggccatcgagggcccagcacggctgagcggctgaaaaaccgtagccatagatcctgtccacctccactcccctctgaccctcaggctttcccagcttcctccccttgctacagcctctgccctggtttgggctatgtcagatccaaaaacatcctgaacctctgtctgtaaaatgagtagtgtctgtactttgaatgagggggttggtggcaggggccagttgaatgtgctgggcggggtggtgggaaggatagtaaatgtgctggggcaaactgacaaatcttcccatccatttcaccacccatctccatccaggccgcgctagagtactggaccaggaatttggatgcctgggttcaaatctgcatctgccatgcacttgtttctgaccttaggccagcccctttccctccctgagtctctattttcttatctacaatgagacagttggacaaaaaaatcttggcttcccttctaacattaacttcctaaagtatgcctccgattcattcccttgacactttttatttctaaggaagaaataaaaagagatacacaaacacataaacacaaaaaaaaaaa

SEQ ID NO: 169 - DNA, 2325 bp, Homo sapiens
  ref <308>: DATABASE ACCESSION NUMBER: NCBI / NM_003465
  ref <309>: DATABASE ENTRY DATE: 2011-12-18
  ref <313>: RELEVANT RESIDUES IN SEQ ID NO: (1)..(2325)
actcctggctggggtgggacagggtggccagataaaagcagagcaggacctggaaagctggtttgtatgggctgcagcctgccgctgagctgcatcatggtgcggtctgtggcctgggcaggtttcatggtcctgctgatgatcccatggggctctgctgcaaaactggtctgctacttcaccaactgggcccagtacagacagggggaggctcgcttcctgcccaaggacttggaccccagcctttgcacccacctcatctacgccttcgctggcatgaccaaccaccagctgagcaccactgagtggaatgacgagactctctaccaggagttcaatggcctgaagaagatgaatcccaagctgaagaccctgttagccatcggaggctggaatttcggcactcagaagttcacagatatggtagccacggccaacaaccgtcagacctttgtcaactcggccatcaggtttctgcgcaaatacagctttgacggccttgaccttgactgggagtacccaggaagccaggggagccctgccgtagacaaggagcgcttcacaaccctggtacaggacttggccaatgccttccagcaggaagcccagacctcagggaaggaacgccttcttctgagtgcagcggttccagctgggcagacctatgtggatgctggatacgaggtggacaaaatcgcccagaacctggattttgtcaaccttatggcctacgacttccatggctcttgggagaaggtcacgggacataacagccccctctacaagaggcaagaagagagtggtgcagcagccagcctcaacgtggatgctgctgtgcaacagtggctgcagaaggggacccctgccagcaagctgatccttggcatgcctacctacggacgctccttcacactggcctcctcatcagacaccagagtgggggccccagccacagggtctggcactccaggccccttcaccaaggaaggagggatgctggcctactatgaagtctgctcctggaagggggccaccaaacagagaatccaggatcagaaggtgccctacatcttccgggacaaccagtgggtgggctttgatgatgtggagagcttcaaaaccaaggtcagctatctgaagcagaagggactgggcggggccatggtctgggcactggacttagatgactttgccggcttctcctgcaaccagggccgataccccctcatccagacgctacggcaggaactgagtcttccatacttgccttcaggcaccccagagcttgaagttccaaaaccaggtcagccctctgaacctgagcatggccccagccctggacaagacacgttctgccagggcaaagctgatgggctctatcccaatcctcgggaacggtccagcttctacagctgtgcagcggggcggctgttccagcaaagctgcccgacaggcctggtgttcagcaactcctgcaaatgctgcacctggaattgagtcgctaaagcccctccagtcccagctttgaggctgggcccaggatcactctacagcctgcctcctgggttttccctgggggccgcaatctggctcctgcaggcctttctgtggtcttcctttatccaggctttctgctctcagccttgccttccttttttctgggtctcctgggctgcccctttcacttgcaaaataaatctttggtttgtgcccctcttcccaaagatgtggtgacttaagaggctctctaagcacactgttgactccaaaacatccgcaggtcagagccaggtgggaaggtggtccgtgcaggatgtgccaggccctgtggcaggtcttgccccatgagtccatatgccagtgggcagtttccagtacacaggtgatggcagccagagcgcggccccaagtgcaacacgttctttggttattggctcagaagcctggaaacaggagcttctgcggaccttcacgcacgtgttattcccaaaatgccactagatggcagcagagaagaacttttccctgatttaagcgctctgcgagcagccactcagcattacactaagaattcagacccctggtactcaggggtcttcgagataaatcctgtttgggccctttgcaggccctatctcacctactgcccccgttcaccagatgaagaaggaacaatgattattctcactttataggcatttaaactgaagactgattctaaccaattctgagtccagaaccaaggcctgaaatgggccagagagcatgcacacggtgtcctggttaaataaagtcatcccaacattcaaaaaaaaaaaaaaaaaa

SEQ ID NO: 170 - DNA, 1177 bp, Homo sapiens
  ref <308>: DATABASE ACCESSION NUMBER: NCBI / NM_003186
  ref <309>: DATABASE ENTRY DATE: 2011-12-17
  ref <313>: RELEVANT RESIDUES IN SEQ ID NO: (1)..(1177)
tcaccacggcggcagccctttaaacccctcacccagccagcgccccatcctgtctgtccgaacccagacacaagtcttcactccttcctgcgagccctgaggaagccttctttccccagacatggccaacaagggtccttcctatggcatgagccgcgaagtgcagtccaaaatcgagaagaagtatgacgaggagctggaggagcggctggtggagtggatcatagtgcagtgtggccctgatgtgggccgcccagaccgtgggcgcttgggcttccaggtctggctgaagaatggcgtgattctgagcaagctggtgaacagcctgtaccctgatggctccaagccggtgaaggtgcccgagaacccaccctccatggtcttcaagcagatggagcaggtggctcagttcctgaaggcggctgaggactatggggtcatcaagactgacatgttccagactgttgacctctttgaaggcaaagacatggcagcagtgcagaggaccctgatggctttgggcagcttggcagtgaccaagaatgatgggcactaccgtggagatcccaactggtttatgaagaaagcgcaggagcataagagggaattcacagagagccagctgcaggagggaaagcatgtcattggccttcagatgggcagcaacagaggggcctcccaggccggcatgacaggctacggacgacctcggcagatcatcagttagagcggagagggctagccctgagcccggccctcccccagctccttggctgcagccatcccgcttagcctgcctcacccacacccgtgtggtaccttcagccctggccaagctttgaggctctgtcactgagcaatggtaactgcacctgggcagctcctccctgtgcccccagcctcagcccaacttcttacccgaaagcatcactgccttggcccctccctcccggctgcccccatcacctctactgtctcctccctgggctaagcaggggagaagcgggctgggggtagcctggatgtgggccaagtccactgtcctccttggcggcaaaagcccattgaagaagaaccagcccagcctgccccctatcttgtcctggaatatttttggggttggaactcaaaaaaaaaaaaaaaaaatcaatcttttctcaaaaaaaaaaaaaaaaaa

SEQ ID NO: 171 - DNA, 962 bp, Homo sapiens
  ref <308>: DATABASE ACCESSION NUMBER: NCBI / NM_000802
  ref <309>: DATABASE ENTRY DATE: 2011-11-27
  ref <313>: RELEVANT RESIDUES IN SEQ ID NO: (1)..(962)
tcaaggttaaacgacaaggacagacatggctcagcggatgacaacacagctgctgctccttctagtgtgggtggctgtagtaggggaggctcagacaaggattgcatgggccaggactgagcttctcaatgtctgcatgaacgccaagcaccacaaggaaaagccaggccccgaggacaagttgcatgagcagtgtcgaccctggaggaagaatgcctgctgttctaccaacaccagccaggaagcccataaggatgtttcctacctatatagattcaactggaaccactgtggagagatggcacctgcctgcaaacggcatttcatccaggacacctgcctctacgagtgctcccccaacttggggccctggatccagcaggtggatcagagctggcgcaaagagcgggtactgaacgtgcccctgtgcaaagaggactgtgagcaatggtgggaagattgtcgcacctcctacacctgcaagagcaactggcacaagggctggaactggacttcagggtttaacaagtgcgcagtgggagctgcctgccaacctttccatttctacttccccacacccactgttctgtgcaatgaaatctggactcactcctacaaggtcagcaactacagccgagggagtggccgctgcatccagatgtggttcgacccagcccagggcaaccccaatgaggaggtggcgaggttctatgctgcagccatgagtggggctgggccctgggcagcctggcctttcctgcttagcctggccctaatgctgctgtggctgctcagctgacctccttttaccttctgatacctggaaatccctgccctgttcagccccacagctcccaactatttggttcctgctccatggtcgggcctctgacagccactttgaataaaccagacaccgcacatgtgtcttgagaattatttggaaaaaaaaaaaaaaaaaa

SEQ ID NO: 172 - DNA, 3966 bp, Homo sapiens
  ref <308>: DATABASE ACCESSION NUMBER: NCBI / NM_004924
  ref <309>: DATABASE ENTRY DATE: 2011-11-12
  ref <313>: RELEVANT RESIDUES IN SEQ ID NO: (1)..(3966)
aggcgcgggcggagggcgggctgaagcagctgaagcggcggtagcggcggcggctcgggcagaggggcgggagctgaggcgggagcggacaggctggtgggcgagcgagaggcggcggaatggtggactaccacgcggcgaaccagtcgtaccagtacggccccagcagcgcgggcaatggcgctggcggcgggggcagcatgggcgactacatggcccaggaggacgactgggaccgggacctgctgctggacccggcctgggagaagcagcagcgcaagaccttcacggcatggtgcaactcccacctgcggaaggcaggcacacagatcgagaacattgatgaggacttccgagacgggctcaagctcatgctgctcctggaggtcatatcaggggagcggttacctaagccggagcgggggaagatgagagtgcacaaaatcaacaatgtgaacaaagcgctggactttattgccagcaaaggcgtcaagctggtctccatcggggcagaagagattgtggacggcaacgcaaagatgaccctgggaatgatctggaccatcatccttaggttcgccatccaggacatctccgtggaagagacctcggccaaggaagggctccttctctggtgccagagaaagacagccccgtataagaacgtcaatgtgcagaacttccacatcagctggaaggatggtcttgccttcaatgccctgatccaccggcacagaccagagctgattgagtatgacaagctgaggaaggacgaccctgtcaccaacctgaacaatgccttcgaagtggctgagaaatacctcgacatccccaagatgctggatgcagaggacatcgtgaacacggcccggcccgacgagaaggccataatgacctatgtgtccagcttctaccatgccttttcaggagcgcagaaggctgaaactgccgccaaccggatctgtaaggtgctggctgtcaaccaagagaacgagcacctgatggaggactacgagaagctggccagcgacctcctggagtggatccggcgcaccatcccctggctggaggaccgtgtgccccaaaagactatccaggagatgcagcagaagctggaggacttccgcgactaccggcgtgtgcacaagccgcccaaggtgcaggagaagtgccagctggagatcaacttcaacacgctgcagaccaagctgcgcctcagcaaccggcccgccttcatgccctccgagggcaagatggtctcggacatcaacaatggctggcagcacttggagcaggctgagaagggctacgaggagtggctgctgaatgagatccgcaggctggagcggctcgaccacctggcagagaagttccggcagaaggcctccatccacgaggcctggactgacgggaaggaagccatgctgaagcaccgggactacgagacggccacactatcggacatcaaagccctcattcgcaagcacgaggccttcgagagcgacctggctgcgcaccaggaccgcgtggagcagatcgccgccattgcccaggagctcaacgagctggattactacgactcccacaatgtcaacacccggtgccagaagatctgtgaccagtgggacgccctcggctctctgacacatagtcgcagggaagccctggagaaaacagagaagcagctggaggccatcgaccagctgcacctggaatacgccaagcgcgcggcccccttcaacaactggatggagagcgccatggaggacctccaggacatgttcatcgtccataccatcgaggagattgagggcctgatctcagcccatgaccagttcaagtccaccctgccggacgccgatagggagcgcgaggccatcctggccatccacaaggaggcccagaggatcgctgagagcaaccacatcaagctgtcgggcagcaacccctacaccaccgtcaccccgcaaatcatcaactccaagtgggagaaggtgcagcagctggtgccaaaacgggaccatgccctcctggaggagcagagcaagcagcagtccaacgagcacctgcgccgccagttcgccagccaggccaatgttgtggggccctggatccagaccaagatggaggagatcgggcgcatctccattgagatgaacgggaccctggaggaccagctgagccacctgaagcagtatgaacgcagcatcgtggactacaagcccaacctggacctgctggagcagcagcaccagctcatccaggaggccctcatcttcgacaacaagcacaccaactataccatggagcacatccgcgtgggctgggagcagctgctcaccaccattgcccgcaccatcaacgaggtggagaaccagatcctcacccgcgacgccaagggcatcagccaggagcagatgcaggagttccgggcgtccttcaaccacttcgacaaggatcatggcggggcgctggggcccgaggagttcaaggcctgcctcatcagcctgggctacgacgtggagaacgaccggcagggtgaggccgagttcaaccgcatcatgagcctggtcgaccccaaccatagcggccttgtgaccttccaagccttcatcgacttcatgtcgcgggagaccaccgacacggacacggctgaccaggtcatcgcttccttcaaggtcttagcaggggacaagaacttcatcacagctgaggagctgcggagagagctgccccccgaccaggccgagtactgcatcgcccgcatggcgccataccagggccctgacgccgtgcccggtgccctcgactacaagtccttctccacggccttgtatggcgagagcgacctgtgaggccccagagacctgacccaacacccccgacggcctccaggaggggcctgggcagccccacagtcccattcctccactctgtatctatgcaaagcactctctgcagtcctccggggtgggtgggtgggcagggaggggctggggcaggctctctcctctctctctttgtgggttggccaggaggttcccccgaccaggttggggagacttggggccagcgcttctggtctggtaaatatgtatgatgtgttgtgcttttttaaccaaggaggggccagtggattcccacagcacaaccggtcccttccatgccctgggatgcctcaccacacccaggtctcttcctttgctctgaggtcccttcaaggcctccccaatccaggccaaagccccatgtgccttgtccaggaactgcctgggccatgcgaggggccagcagagggcgccaccaccacctgacggctggggacccacccagcccctctcccctctctgctccagactcacttgccattgccaggagatggccccaacaagcaccccgcttttgcagcagaggagctgagttggcagaccgggcccccctgaaccgcaccccatcccaccagccccggccttgctttgtctggcctcacgtgtctcagattttctaagaaccaaaaaaaaaaaaggaaaaaaaacacaaaacaacaaaaaccaaaaaaaaaaaaaatcacaaaaacaaaaaaactataaaaaagaaagaattaaaaactttcagagaattactatttactttattaacttacggatttattatataaatatatattcacctagcaacatatctctgccgtctctcctgctctcataatgaagacatagccgattctctgcccgggccccttgctgatgctcctccgggtctgcgtcgggcgtgggtctctggggaccctccagaggtggaggtgggctgatggcctggctgcctggtggttgatggttttgctccccctaccttttttttttgagtttattctgattgattttttttcttggtttctggataaaccaccctctggggacaggataataaaacatgtaatatttttaagaaggaaaaaaaaaaaaa

SEQ ID NO: 173 - DNA, 1744 bp, Homo sapiens
  ref <308>: DATABASE ACCESSION NUMBER: NCBI / NM_002931
  ref <309>: DATABASE ENTRY DATE: 2011-11-20
  ref <313>: RELEVANT RESIDUES IN SEQ ID NO: (1)..(1744)
cagcgcccgggccatggcggcggcggtggcgggagctgctgtctgagcagcggttgcggaccgagcgaacttggcccaggagcccgggcctagggagaggcgcggcggcggcgggagcgcgaacggctggagctggccttcttcgccttctcctcggctgtggagccctggtggggggtctgcgcccggtcaccatgacgacgccggcgaatgcccagaatgccagcaaaacgtgggaactgagtctgtatgagctgcaccggaccccgcaggaagccataatggatggcacagagattgctgtttcccctcggtcactgcattcagaactcatgtgccctatctgcctggacatgctgaagaatacgatgaccaccaaggagtgcctccacagattctgctctgactgcattgtcacagccctacggagcgggaacaaggagtgtcctacctgccgaaagaagctggtgtccaagcgatccctacggccagaccccaactttgatgccctgatctctaagatctatcctagccgggaggaatacgaggcccatcaagaccgagtgcttatccgcctgagccgcctgcacaaccagcaggcattgagctccagcattgaggaggggctacgcatgcaggccatgcacagggcccagcgtgtgaggcggccgataccagggtcagatcagaccacaacgatgagtgggggggaaggagagcccggggagggagaaggggatggagaagatgtgagctcagactccgcccctgactctgccccaggccctgctcccaagcgaccccgtggagggggcgcaggggggagcagtgtagggacagggggaggcggcactggtggggtgggtgggggtgccggttcggaagactctggtgaccggggagggactctgggagggggaacgctgggccccccaagccctcctggggcccccagccccccagagccaggtggagaaattgagctcgtgttccggccccaccccctgctcgtggagaagggagaatactgccagacgaggtatgtgaagacaactgggaatgccacagtggaccacctctccaagtacttggccctgcgcattgccctcgagcggaggcaacagcaggaagcaggggagccaggagggcctggagggggcgcctctgacaccggaggacctgatgggtgtggcggggagggtgggggtgccggaggaggtgacggtcctgaggagcctgctttgcccagcctggagggcgtcagtgaaaagcagtacaccatctacatcgcacctggaggcggggcgttcacgacgttgaatggctcgctgaccctggagctggtgaatgagaaattctggaaggtgtcccggccactggagctgtgctatgctcccaccaaggatccaaagtgaccccaccaggggacagccagaggaaggggaccatggggtatccctgtgtcctggtctatcaccccagcttctttgtcccccagtacccccagcccagccagccaataagaggacacaaatgaggacacgtggcttttatacaaagtatctatatgagattcttctatattgtacagagtggggcaaaacacgcccccatctgctgccttttctattgccctgcaacgtcccatctatacgaggtgttggagaaggtgaagaaccctcccattcacgcccgcctaccaacaacaaacgtgcttttttcctctttgaaacctgcaaaaaaa

SEQ ID NO: 174 - DNA, 4263 bp, Homo sapiens
  ref <308>: DATABASE ACCESSION NUMBER: NCBI / NM_000020
  ref <309>: DATABASE ENTRY DATE: 2011-12-25
  ref <313>: RELEVANT RESIDUES IN SEQ ID NO: (1)..(4263)
aggaaacggtttattaggagggagtggtggagctgggccaggcaggaagacgctggaataagaaacatttttgctccagcccccatcccagtcccgggaggctgccgcgccagctgcgccgagcgagcccctccccggctccagcccggtccggggccgcgcccggaccccagcccgccgtccagcgctggcggtgcaactgcggccgcgcggtggaggggaggtggccccggtccgccgaaggctagcgccccgccacccgcagagcgggcccagagggaccatgaccttgggctcccccaggaaaggccttctgatgctgctgatggccttggtgacccagggagaccctgtgaagccgtctcggggcccgctggtgacctgcacgtgtgagagcccacattgcaaggggcctacctgccggggggcctggtgcacagtagtgctggtgcgggaggaggggaggcacccccaggaacatcggggctgcgggaacttgcacagggagctctgcagggggcgccccaccgagttcgtcaaccactactgctgcgacagccacctctgcaaccacaacgtgtccctggtgctggaggccacccaacctccttcggagcagccgggaacagatggccagctggccctgatcctgggccccgtgctggccttgctggccctggtggccctgggtgtcctgggcctgtggcatgtccgacggaggcaggagaagcagcgtggcctgcacagcgagctgggagagtccagtctcatcctgaaagcatctgagcagggcgacagcatgttgggggacctcctggacagtgactgcaccacagggagtggctcagggctccccttcctggtgcagaggacagtggcacggcaggttgccttggtggagtgtgtgggaaaaggccgctatggcgaagtgtggcggggcttgtggcacggtgagagtgtggccgtcaagatcttctcctcgagggatgaacagtcctggttccgggagactgagatctataacacagtgttgctcagacacgacaacatcctaggcttcatcgcctcagacatgacctcccgcaactcgagcacgcagctgtggctcatcacgcactaccacgagcacggctccctctacgactttctgcagagacagacgctggagccccatctggctctgaggctagctgtgtccgcggcatgcggcctggcgcacctgcacgtggagatcttcggtacacagggcaaaccagccattgcccaccgcgacttcaagagccgcaatgtgctggtcaagagcaacctgcagtgttgcatcgccgacctgggcctggctgtgatgcactcacagggcagcgattacctggacatcggcaacaacccgagagtgggcaccaagcggtacatggcacccgaggtgctggacgagcagatccgcacggactgctttgagtcctacaagtggactgacatctgggcctttggcctggtgctgtgggagattgcccgccggaccatcgtgaatggcatcgtggaggactatagaccacccttctatgatgtggtgcccaatgaccccagctttgaggacatgaagaaggtggtgtgtgtggatcagcagacccccaccatccctaaccggctggctgcagacccggtcctctcaggcctagctcagatgatgcgggagtgctggtacccaaacccctctgcccgactcaccgcgctgcggatcaagaagacactacaaaaaattagcaacagtccagagaagcctaaagtgattcaatagcccaggagcacctgattcctttctgcctgcagggggctgggggggtggggggcagtggatggtgccctatctgggtagaggtagtgtgagtgtggtgtgtgctggggatgggcagctgcgcctgcctgctcggcccccagcccacccagccaaaaatacagctgggctgaaacctgatcccctgctgtctggcctgctcaaagcggcaggctccctgacgcctggctctctccccacccctatggccagcatggtgcaccccctaccactcccgggacaggatgcaaaagaggctccagagtcagagtgccaagccagggaatcccagtcccagactcagagcccgggcctgcactttgccccctgcccttgatcaaccccactgccccaccagagctgccagggtggcacagggccctgtccagcccctggcacacacttccctgccaggcctcagcctctagcataagctccagagagccagggcccatcagtttctctctgtggatttgtatctcagctccatgatgccttgggctttctgtctcctcaacaagagtgcagcttgctgaatgtcagctgcctgagagagctggggcctgacttactagggcattaaatcctaagaggtcctactgaggtgtggcaggatcacaggccagtggaaaaagggcaggtcagatgggcaaggcccaggactttcagattaactgagaggatatcgaggccaagcatggcagggggaaggtcagtgggtgtcaagagacccaggtctgaccccggatgtttgctccatgtgacaaaagcaggcctgtctcaggaccttttcttttcttttttccttctttttttttttgacacggagtttcgctcttgttgtccaggctagagtgcaatggcatgatcccagctcaccgcaacgtctacctcccaggttcaaatcattctcttgcctcagactcccgagtagctgggattacaggcacatgccaccatgcctggctaattttgtatatttagtagaaacagggtttcaccatgctggccatgctggtctcgaactcctgacctcaggtgttccacctacctcagcctcccaaagtgctggggttacaggtgtgagccatcgcgcctggccaggacctttgtttcttatctacatattggaagatttggtcctgatgtcctttgaggcttctttagctctagttctctgacacttcagcctatatcacagctaacttcttcagtctcatctattccttatgctccagcccctggcaatttgcctcaagatgggggtttgaaaataactttacctgactcaaggagtgtctggagcacctcctagtctaagtctgcaagctccagttcttgcctaaaaccatgccagtggccacccttgggctcagacagctctgggccttttgaccacaagccagcccctcgccctctctgtggcatagtcttctctgccccaggactgcagggcggcttcctccaaggcttccaaggctcaaaagaaatttggctccatccaagaaggctccagctcccctactggcccctggctcaggcccacacccctggccaggcccagagagtgtgtctcaggagaattcaatggctctagagagacacacagaaagtttggcatttggaaatttcaaggatgtatgtatgctcacgtatggagcaggttgtcctggtccctgggtgcagggaagtgggctgcagggaagtggattggaggggagcttgaggaatataaggagcgggggtggagactcaggctatggacaaggacagccccaaggttgggaagacctggccttagtcgtcctcagcctaggggcagggcagtgaagaaagctctccccgctcctgctgtaatgacccagagtagcctccccaggccggcatcttatgtgtgtcttccaccatcctcatggtggcacttttctaggcctgtctcccagcattgtgcaaggctcggaagagaaccaggaagtgaaactgggtgaaaacagaaagctcaatggatgggctaggttcccagatcattagggcagagtttgcacgtcctctggtcactggaatccacccagcccacgaatcatctccctcttgaaggattttatttctactgggttttggaacaaactcctgctgagaccccacagccagaaactgaaagcagcagctccccaaagcctggaaaatccctaagagaaggcctggggcaggaagtggagtgacaggggacaggtagagagaagggggcccaatggccagggagtgaaggaggtggcgttgctgagagcagtctgcacatgcttctgtctgagtgcaggaaggtgttccagggtcgaaattacacttctcgtacctggagacgctgtttgtgggagcactgggctcatgcctggcacacaataggtctgcaataaaccatggttaaatcctga

SEQ ID NO: 175 - DNA, 985 bp, Homo sapiens
  ref <308>: DATABASE ACCESSION NUMBER: NCBI / NM_001785
  ref <309>: DATABASE ENTRY DATE: 2011-11-21
  ref <313>: RELEVANT RESIDUES IN SEQ ID NO: (1)..(985)
caaaccatgggaggctcctctcctagaccctgcatcctgaaagctgcgtacctgagagcctgcggtctggctgcagggacacacccaaggggaggagctgcaatcgtgtctggggccccagcccaggctggccggagctcctgtttcccgctgctctgctgcctgcccggggtaccaacatggcccagaagcgtcctgcctgcaccctgaagcctgagtgtgtccagcagctgctggtttgctcccaggaggccaagaagtcagcctactgcccctacagtcactttcctgtgggggctgccctgctcacccaggaggggagaatcttcaaagggtgcaacatagaaaatgcctgctacccgctgggcatctgtgctgaacggaccgctatccagaaggccgtctcagaagggtacaaggatttcagggcaattgctatcgccagtgacatgcaagatgattttatctctccatgtggggcctgcaggcaagtcatgagagagtttggcaccaactggcccgtgtacatgaccaagccggatggtacgtatattgtcatgacggtccaggagctgctgccctcctcctttgggcctgaggacctgcagaagacccagtgacagccagagaatgcccactgcctgtaacagccacctggagaacttcataaagatgtctcacagccctggggacacctgcccagtgggccccagccctacagggactgggcaaagatgatgtttccagattacactccagcctgagtcagcacccctcctagcaacctgccttgggacttagaacaccgccgccccctgccccacctttcctttccttcctgtgggccctctttcaaagtccagcctagtctggactgcttccccatcagccttcccaaggttctatcctgttccgagcaacttttctaattataaacatcacagaacatcctggatcaaaaaaaaaaaaaaaaaaaaaaaaaaaa

SEQ ID NO: 176 - DNA, 2843 bp, Homo sapiens
  ref <308>: DATABASE ACCESSION NUMBER: NCBI / NM_004339
  ref <309>: DATABASE ENTRY DATE: 2011-12-24
  ref <313>: RELEVANT RESIDUES IN SEQ ID NO: (1)..(2843)
atccgcgccgcgcaggcgcactgagcctcagccgctctcctcgctaccaggctcctttcctctatcgcgcaggcgcactgaacctcagccgcgccgggaggcgagcccgttggcgaggggcggggcagatggcgagggagcggggcgagctgctttttgaggctgcgcactcgcatggccccacctcgcaggtccacttccggcgccgcggctgttccgggcggagaccgcttgtgctggagtcggagttgtaacgctccactgactgatagagcgaccggccgaccatggcgcccggagtggcccgcgggccgacgccgtactggaggttgcgcctcggtggcgccgcgctgctcctgctgctcatcccggtggccgccgcgcaggagcctcccggagctgcttgttctcagaacacaaacaaaacctgtgaagagtgcctgaagaacgtctcctgtctttggtgcaacactaacaaggcttgtctggactacccagttacaagcgtcttgccaccggcttccctttgtaaattgagctctgcacgctggggagtttgttgggtgaactttgaggcgctgatcatcaccatgtcggtagtcgggggaaccctcctcctgggcattgccatctgctgctgctgctgctgcaggaggaagaggagccggaagccggacaggagtgaggagaaggccatgcgtgagcgggaggagaggcggatacggcaggaggaacggagagcagagatgaagacaagacatgatgaaatcagaaaaaaatatggcctgtttaaagaagaaaacccgtatgctagatttgaaaacaactaaagcgctccagcacatcagtcccgacgcttcctgtgaggtgcacgctccgcagcccagcccagccgggagaccacgtggccattgcggtctcctgaccttggccagtgaacctgccagccttccaggacaggcggccggagagctgcccctgaaggacagtcctctcgtcttgcagactggtgaccttctattccctgttcatctctgtttctagatttagtcacttgaaataagaaatctttggggtttgggcttttttatactcttctcagtttgtgaaacgctaactgcacacgaagccgcctgacggcacccagcgctgtggctgtcattctcccagggcagaaccctgcgtttctctctgtccactaacaagcttcacacgcaacacagggaagtcggtttgacttttgtcatgaggagaactgaccagccctcatcattccccataaaaccacggacagcgtctgtgtgcgcatcttgagtcttcacacctgttgactcacacggcttttgctgatgacacggggctccagtacacagtctgataaggacttaacgtcctaacctcaattgtattaaatagcattggggaatagctaaacctttttaaaaaaatttattggattttcctccctgcttaaaagatttcaccagaaaaccttcatataaaaattcaggccctttttggacaatttttaaaatttgtatctttactagaacatgagaatctttttcccttggaagcttgaattataaatgtggtgtttggcctgcctcagcagcaccagttgactgctcgtgtgccagcggtgtggggaggacggggcaggacgctgcagctctctccagccctgttggcatcctcagtgcctgcaggcctctcgctgcctgttgggctgtctggggggtggccatttagggatcgtggggacggggtccaccccaagaagaaagaaaggcccgtccacaggcccggctctgggccacgtgccccggaagcaggtgtgtccagagtcagctgagggctctccccacaccacccagcaggcgctggtgctccttctgcctcatgggaccagtccagcttccagccgctctggctcgagggtggtctgaccacttccttctgagtgggcttctctgggagctctccagtggcactgctggacctgcccacgtttctgtaaaatcaggatacgtggctttagtaagcagaccaagcgcttcgtggcagggaaagcagcgtgcggggaagtcactgaaaagtgctgcctaaggaagtttggaaatagtccctgttccagattgccttgaattttaaaacattttgctttgggaaagtaggtcagcagcacctaagatcaaggatgcgttccattttcacacttcacagtcatgaaaactgagaagactgtcttcagcgtgaactaaagttcacaggcagatcactgatccagaacacttcaagaactcgtcaaacagctcgataagcctttttgactgtgtacatctgtaccgggaataacattcctaggctgaaatttccacaaagaatagaacctgtacccagttcttcaggctgatttccctgacctcttgggcatttgtatttgtagtaaagtattgcagagattcctaagtattttatagcagccatcaaaattggactttgtattgtttattcataaaagacacttggtaatagacttcagtgaactctgtatgaatgcagtagtgtgtgtgcaaaatccgcttcctgagcgtagggtgctgagctggcgctagggctcggttgtgaaatacagcgtagtcagcccttgcgctcagtgtagaaacccacgtctgtaaggtcggtcttcgtccatctgcttttttctgaaatacactaagagcagccacaaaactgtaacctcaaggaaaccataaagcttggagtgccttaatttttaaccagtttccaataaaacggtttactacctgcgtgtgtttagtaaaaaaaaaaaaaaaaaa

SEQ ID NO: 177 - DNA, 1179 bp, Homo sapiens
  ref <308>: DATABASE ACCESSION NUMBER: NCBI / NM_003860
  ref <309>: DATABASE ENTRY DATE: 2011-12-24
  ref <313>: RELEVANT RESIDUES IN SEQ ID NO: (1)..(1179)
ccagtgttcccagttcccaccagtccaactgcgaggagtgcgacgtgagtctgagtctgatccctccgaaaaccgtacttccggcgctgtctcggaggcctcccgtcccctcccttgtccgtcttctaactcttccccacgccaggtccgtcaagcctaagtccttgagttccgggtccgggcagcagagaaaggaagtcctctccctggaggcctatctccctcagaactgcgcgagaagcgagaccttagaaggcagggcttcccgcgaaggaccggaaaggagcgcctactaaggacgccgtcgaggtccggggcgcctcaactctatagctctaactggctagaagtgcccaacgtggaatgtttcttttttaaaggcggctcttgaagcgacccggaagcggaagtggaagaaagttctagtggcttgaggtatccgcaggagcggccgggtggcgggaggaaccgttacgggaactgaagttgcggattaagcctgatcaagatgacaacctcccaaaagcaccgagacttcgtggcagagcccatgggggagaagccagtggggagcctggctgggattggtgaagtcctgggcaagaagctggaggaaaggggttttgacaaggcctatgttgtccttggccagtttctggtgctaaagaaagatgaagacctcttccgggaatggctgaaagacacttgtggcgccaacgccaagcagtcccgggactgcttcggatgccttcgagagtggtgcgacgccttcttgtgatgctctctgggaagctctcaatccccagccctcatccagagtttgcagccgagtagggactcctcccctgtcctctacgaaggaaaagattgctattgtcgtactcacctccgacgtactccggggtcttttgggagttttctcccctaaccatttcaacttttttttggattctcgctcttgcatgcctcccccgtcctttttcccttgccagttccctggtgacagttaccagctttcctgaatggattcccggccccatccctcacccccaccctcactttcaatccgtttgataccatttggctccttttttggcagaacagtcactgtccttgtaaagttttttagatcaataaagtcagtggctttcaaaaaaaaaaaaaaaaaaaaaaaaaaaa

SEQ ID NO: 178 - DNA, 5988 bp, Homo sapiens
  ref <308>: DATABASE ACCESSION NUMBER: NCBI / NM_000214
  ref <309>: DATABASE ENTRY DATE: 2011-12-25
  ref <313>: RELEVANT RESIDUES IN SEQ ID NO: (1)..(5988)
ctgcccggcgtgctgggtagaggtggccagccccggccgctgctgccagacgggctctccgggtccttctccgagagccgggcgggcacgcgtcattgtgttacctgcggccggcccgcgagctaggctggtttttttttttctcccctccctcccccctttttccatgcagctgatctaaaagggaataaaaggctgcgcataatcataataataaaagaaggggagcgcgagagaaggaaagaaagccgggaggtggaagaggagggggagcgtctcaaagaagcgatcagaataataaaaggaggccgggctctttgccttctggaacgggccgctcttgaaagggcttttgaaaagtggtgttgttttccagtcgtgcatgctccaatcggcggagtatattagagccgggacgcggcggccgcaggggcagcggcgacggcagcaccggcggcagcaccagcgcgaacagcagcggcggcgtcccgagtgcccgcggcgcgcggcgcagcgatgcgttccccacggacgcgcggccggtccgggcgccccctaagcctcctgctcgccctgctctgtgccctgcgagccaaggtgtgtggggcctcgggtcagttcgagttggagatcctgtccatgcagaacgtgaacggggagctgcagaacgggaactgctgcggcggcgcccggaacccgggagaccgcaagtgcacccgcgacgagtgtgacacatacttcaaagtgtgcctcaaggagtatcagtcccgcgtcacggccggggggccctgcagcttcggctcagggtccacgcctgtcatcgggggcaacaccttcaacctcaaggccagccgcggcaacgaccgcaaccgcatcgtgctgcctttcagtttcgcctggccgaggtcctatacgttgcttgtggaggcgtgggattccagtaatgacaccgttcaacctgacagtattattgaaaaggcttctcactcgggcatgatcaaccccagccggcagtggcagacgctgaagcagaacacgggcgttgcccactttgagtatcagatccgcgtgacctgtgatgactactactatggctttggctgcaataagttctgccgccccagagatgacttctttggacactatgcctgtgaccagaatggcaacaaaacttgcatggaaggctggatgggccccgaatgtaacagagctatttgccgacaaggctgcagtcctaagcatgggtcttgcaaactcccaggtgactgcaggtgccagtacggctggcaaggcctgtactgtgataagtgcatcccacacccgggatgcgtccacggcatctgtaatgagccctggcagtgcctctgtgagaccaactggggcggccagctctgtgacaaagatctcaattactgtgggactcatcagccgtgtctcaacgggggaacttgtagcaacacaggccctgacaaatatcagtgttcctgccctgaggggtattcaggacccaactgtgaaattgctgagcacgcctgcctctctgatccctgtcacaacagaggcagctgtaaggagacctccctgggctttgagtgtgagtgttccccaggctggaccggccccacatgctctacaaacattgatgactgttctcctaataactgttcccacgggggcacctgccaggacctggttaacggatttaagtgtgtgtgccccccacagtggactgggaaaacgtgccagttagatgcaaatgaatgtgaggccaaaccttgtgtaaacgccaaatcctgtaagaatctcattgccagctactactgcgactgtcttcccggctggatgggtcagaattgtgacataaatattaatgactgccttggccagtgtcagaatgacgcctcctgtcgggatttggttaatggttatcgctgtatctgtccacctggctatgcaggcgatcactgtgagagagacatcgatgaatgtgccagcaacccctgtttgaatgggggtcactgtcagaatgaaatcaacagattccagtgtctgtgtcccactggtttctctggaaacctctgtcagctggacatcgattattgtgagcctaatccctgccagaacggtgcccagtgctacaaccgtgccagtgactatttctgcaagtgccccgaggactatgagggcaagaactgctcacacctgaaagaccactgccgcacgaccccctgtgaagtgattgacagctgcacagtggccatggcttccaacgacacacctgaaggggtgcggtatatttcctccaacgtctgtggtcctcacgggaagtgcaagagtcagtcgggaggcaaattcacctgtgactgtaacaaaggcttcacgggaacatactgccatgaaaatattaatgactgtgagagcaacccttgtagaaacggtggcacttgcatcgatggtgtcaactcctacaagtgcatctgtagtgacggctgggagggggcctactgtgaaaccaatattaatgactgcagccagaacccctgccacaatgggggcacgtgtcgcgacctggtcaatgacttctactgtgactgtaaaaatgggtggaaaggaaagacctgccactcacgtgacagtcagtgtgatgaggccacgtgcaacaacggtggcacctgctatgatgagggggatgcttttaagtgcatgtgtcctggcggctgggaaggaacaacctgtaacatagcccgaaacagtagctgcctgcccaacccctgccataatgggggcacatgtgtggtcaacggcgagtcctttacgtgcgtctgcaaggaaggctgggaggggcccatctgtgctcagaataccaatgactgcagccctcatccctgttacaacagcggcacctgtgtggatggagacaactggtaccggtgcgaatgtgccccgggttttgctgggcccgactgcagaataaacatcaatgaatgccagtcttcaccttgtgcctttggagcgacctgtgtggatgagatcaatggctaccggtgtgtctgccctccagggcacagtggtgccaagtgccaggaagtttcagggagaccttgcatcaccatggggagtgtgataccagatggggccaaatgggatgatgactgtaatacctgccagtgcctgaatggacggatcgcctgctcaaaggtctggtgtggccctcgaccttgcctgctccacaaagggcacagcgagtgccccagcgggcagagctgcatccccatcctggacgaccagtgcttcgtccacccctgcactggtgtgggcgagtgtcggtcttccagtctccagccggtgaagacaaagtgcacctctgactcctattaccaggataactgtgcgaacatcacatttacctttaacaaggagatgatgtcaccaggtcttactacggagcacatttgcagtgaattgaggaatttgaatattttgaagaatgtttccgctgaatattcaatctacatcgcttgcgagccttccccttcagcgaacaatgaaatacatgtggccatttctgctgaagatatacgggatgatgggaacccgatcaaggaaatcactgacaaaataatcgatcttgttagtaaacgtgatggaaacagctcgctgattgctgccgttgcagaagtaagagttcagaggcggcctctgaagaacagaacagatttccttgttcccttgctgagctctgtcttaactgtggcttggatctgttgcttggtgacggccttctactggtgcctgcggaagcggcggaagccgggcagccacacacactcagcctctgaggacaacaccaccaacaacgtgcgggagcagctgaaccagatcaaaaaccccattgagaaacatggggccaacacggtccccatcaaggattatgagaacaagaactccaaaatgtctaaaataaggacacacaattctgaagtagaagaggacgacatggacaaacaccagcagaaagcccggtttgccaagcagccggcgtacacgctggtagacagagaagagaagccccccaacggcacgccgacaaaacacccaaactggacaaacaaacaggacaacagagacttggaaagtgcccagagcttaaaccgaatggagtacatcgtatagcagaccgcgggcactgccgccgctaggtagagtctgagggcttgtagttctttaaactgtcgtgtcatactcgagtctgaggccgttgctgacttagaatccctgtgttaatttaagttttgacaagctggcttacactggcaatggtagtttctgtggttggctgggaaatcgagtgccgcatctcacagctatgcaaaaagctagtcaacagtaccctggttgtgtgtccccttgcagccgacacggtctcggatcaggctcccaggagcctgcccagccccctggtctttgagctcccacttctgccagatgtcctaatggtgatgcagtcttagatcatagttttatttatatttattgactcttgagttgtttttgtatattggttttatgatgacgtacaagtagttctgtatttgaaagtgcctttgcagctcagaaccacagcaacgatcacaaatgactttattatttattttttttaattgtatttttgttgttgggggaggggagactttgatgtcagcagttgctggtaaaatgaagaatttaaagaaaaaaatgtcaaaagtagaactttgtatagttatgtaaataattcttttttattaatcactgtgtatatttgatttattaacttaataatcaagagccttaaaacatcattcctttttatttatatgtatgtgtttagaattgaaggtttttgatagcattgtaagcgtatggctttatttttttgaactcttctcattacttgttgcctataagccaaaattaaggtgtttgaaaatagtttattttaaaacaataggatgggcttctgtgcccagaatactgatggaatttttttgtacgacgtcagatgtttaaaacaccttctatagcatcacttaaaacacgttttaaggactgactgaggcagtttgaggattagtttagaacaggtttttttgtttgtttgttttttgtttttctgctttagacttgaaaagagacaggcaggtgatctgctgcagagcagtaagggaacaagttgagctatgacttaacatagccaaaatgtgagtggttgaatatgattaaaaatatcaaattaattgtgtgaacttggaagcacaccaatcttactttgtaaattctgatttcttttcaccattcgtacataatactgaaccacttgtagatttgatttttttttttaatctactgcatttagggagtattctaataagctagttgaatacttgaaccataaaatgtccagtaagatcactgtttagatttgccatagagtacactgcctgccttaagtgaggaaatcaaagtgctattacgaagttcaagatcaaaaaggcttataaaacagagtaatcttgttggttcaccattgagaccgtgaagatactttgtattgtcctattagtgttatatgaacatacaaatgcatctttgatgtgttgttcttggcaataaattttgaaaagtaatatttattaaatttttttgtatgaaaacatggaacagtgtggcctcttctgagcttacgtagttctaccggctttgccatgtgcttctgccaccctgctgagtctgttctggtaatcggggtataataggctctgcctgacagagggatggaggaagaactgaaaggcttttcaaccacaaaactcatctggagttctcaaagacctggggctgctgtgaagctggaactgcgggagccccatctaggggagccttgattcccttgttattcaacagcaagtgtgaatactgcttgaataaacaccactggattaatggcca

SEQ ID NO: 179 - DNA, 1252 bp, Homo sapiens
  ref <308>: DATABASE ACCESSION NUMBER: NCBI / NM_002167
  ref <309>: DATABASE ENTRY DATE: 2011-12-24
  ref <313>: RELEVANT RESIDUES IN SEQ ID NO: (1)..(1252)
gatctggggtgctgccaggaaaaagcaaattctggaagttaatggttttgagtgatttttaaatccttgctggcggagaggcccgcctctccccggtatcagcgcttcctcattctttgaatccgcggctccgcggtcttcggcgtcagaccagccggaggaagcctgtttgcaatttaagcgggctgtgaacgcccagggccggcgggggcagggccgaggcgggccattttgaataaagaggcgtgccttccaggcaggctctataagtgaccgccgcggcgagcgtgcgcgcgttgcaggtcactgtagcgggacttcttttggttttctttctctttggggcacctctggactcactccccagcatgaaggcgctgagcccggtgcgcggctgctacgaggcggtgtgctgcctgtcggaacgcagtctggccatcgcccggggccgagggaagggcccggcagctgaggagccgctgagcttgctggacgacatgaaccactgctactcccgcctgcgggaactggtacccggagtcccgagaggcactcagcttagccaggtggaaatcctacagcgcgtcatcgactacattctcgacctgcaggtagtcctggccgagccagcccctggaccccctgatggcccccaccttcccatccagacagccgagctcactccggaacttgtcatctccaacgacaaaaggagcttttgccactgactcggccgtgtcctgacacctccagaacgcaggtgctggcgcccgttctgcctgggaccccgggaacctctcctgccggaagccggacggcagggatgggccccaacttcgccctgcccacttgacttcaccaaatcccttcctggagactaaacctggtgctcaggagcgaaggactgtgaacttgtggcctgaagagccagagctagctctggccaccagctgggcgacgtcaccctgctcccaccccacccccaagttctaaggtctcttcagagcgtggaggtgtggaaggagtggctgctctccaaactatgccaaggcggcggcagagctggtcttctggtctccttggagaaaggttctgttgccctgatttatgaactctataatagagtatataggttttgtaccttttttacaggaaggtgactttctgtaacaatgcgatgtatattaaactttttataaaagttaacattttgcataataaacgatttttaaacacttgaaaaaaaaaaaaa

SEQ ID NO: 180 - DNA, 1926 bp, Homo sapiens
  ref <308>: DATABASE ACCESSION NUMBER: NCBI / NM_001664
  ref <309>: DATABASE ENTRY DATE: 2011-12-18
  ref <313>: RELEVANT RESIDUES IN SEQ ID NO: (1)..(1926)
gtggatgagctgtgagtgcgcgcgcgtgcgcggggccgcgacctgtgccggctcgagcccgctgggcactcggaggcgcgcacgtcgttccccgccctcccgccgccgcccgccctcgctctctcgcgctaccctcccgccgcccgcggtcctccgtcggttctctcgttagtccacggtctggtcttcagctacccgccttcgtctccgagtttgcgactcgcggaccggcgtccccggcgcgaagaggctggactcggattcgttgcctgagcaatggctgccatccggaagaaactggtgattgttggtgatggagcctgtggaaagacatgcttgctcatagtcttcagcaaggaccagttcccagaggtgtatgtgcccacagtgtttgagaactatgtggcagatatcgaggtggatggaaagcaggtagagttggctttgtgggacacagctgggcaggaagattatgatcgcctgaggcccctctcctacccagataccgatgttatactgatgtgtttttccatcgacagccctgatagtttagaaaacatcccagaaaagtggaccccagaagtcaagcatttctgtcccaacgtgcccatcatcctggttgggaataagaaggatcttcggaatgatgagcacacaaggcgggagctagccaagatgaagcaggagccggtgaaacctgaagaaggcagagatatggcaaacaggattggcgcttttgggtacatggagtgttcagcaaagaccaaagatggagtgagagaggtttttgaaatggctacgagagctgctctgcaagctagacgtgggaagaaaaaatctgggtgccttgtcttgtgaaaccttgctgcaagcacagcccttatgcggttaattttgaagtgctgtttattaatcttagtgtatgattactggcctttttcatttatctataatttacctaagattacaaatcagaagtcatcttgctaccagtatttagaagccaactatgattattaacgatgtccaacccgtctggcccaccagggtccttttgacactgctctaacagccctcctctgcactcccacctgacacaccaggcgctaattcaaggaatttcttaacttcttgcttctttctagaaagagaaacagttggtaacttttgtgaattaggctgtaactactttataactaacatgtcctgcctattatctgtcagctgcaaggtactctggtgagtcaccacttcagggctttactccgtaacagattttgttggcatagctctggggtgggcagttttttgaaaatgggctcaaccagaaaagcccaagttcatgcagctgtggcagagttacagttctgtggtttcatgttagttaccttatagttactgtgtaattagtgccacttaatgtatgttaccaaaaataaatatatctaccccagactagatgtagtattttttgtataattggatttcctaatactgtcatcctcaaagaaagtgtattggttttttaaaaaagaaagtgtatttggaaataaagtcagatggaaaattcattttttaaattcccgttttgtcactttttctgataaaagatggccatattaccccttttcggccccatgtatctcagtaccccatggagctgggctaagtaaataggaattggtttcacgcctgaggcaattagacactttggaagatggcataacctgtctcacctggacttaagcatctggctctaattcacagtgctcttttctcctcactgtatccaggttccctcccagaggagccaccagttctcatgggtggcactcagtctctcttctctccagctgactaaactttttttctgtaccagttaatttttccaactactaatagaataaaggcagttttctaaaaaaa

SEQ ID NO: 181 - DNA, 1604 bp, Homo sapiens
  ref <308>: DATABASE ACCESSION NUMBER: NCBI / NM_003166
  ref <309>: DATABASE ENTRY DATE: 2010-11-12
  ref <313>: RELEVANT RESIDUES IN SEQ ID NO: (1)..(1604)
gtccctttgatgacgcggagcctgagccagaccagggggatccaggggcctgctgctccctgtgcgcccagaccatccaggatgaagaggggcccttgtgttgcccccaccctggctgcctgctaagggcccatgtgatctgcctggcagaggagtttcttcaggaagaaccagggcagcttctgcccctagagggccaatgcccttgctgtgagaagtcactgctttggggagacctgatctggctgtgccagatggacactgagaaagaagtagaagactcagaattagaagaggaacatggagctgatccaggacacctcccgcccgccactggagtacgtgaagggggtcccgctcatcaagtactttgcagaggcactggggcccctgcagagcttccaagcccgacctgatgacctgctcatcaacacctaccccaagtctggcaccacctgggtgagccagatactggacatgatctaccagggcggcgacctagagaagtgtaaccgggctcccatctacgtacgggtgcccttccttgaggtcaatgatccaggggaaccctcagggctggagactctgaaagacacaccgcccccacggctcatcaagtcacacctgcccctggctctgctccctcagactctgttggatcagaaggtcaaggtggtctatgttgcccgaaacccaaaggacgtggcggtctcctactaccatttccaccgtatggaaaaggcgcaccctgagcctgggacctgggacagcttcctggaaaagttcatggctggagaagtgtcctacgggtcctggtaccagcacgtgcaggagtggtgggagctgagccgcacccaccctgttctctacctcttctatgaagacatgaaggagaaccccaaaagggagattcaaaagatcctggagtttgtggggcgctccctgccagaggagaccatggacttcatggttcagcacacgtcgttcaaggagatgaagaagaaccctatgaccaactacaccaccgtcccccaggagctcatggaccacagcatctcccccttcatgaggaaaggcatggctggggactggaagaccaccttcaccgtggcgcagaatgagcgcttcgatgcggactatgcggagaagatggcaggctgcagcctcagcttccgctctgagctgtgagaggggctcctggagtcactgcagagggagtgtgcgaatctaccctgaccaatgggctcaagaataaagtatgatttttgagtcaggcacagtggctcatgtctgcaatcccagcgatttgggaggttgagctggtaggatcacaataggccacgaatttgagaccagcctggtaaaatagtgagacctcatctctacaaagatgtaaaaaaattagccacatgtgctggcacttacctgtagtcccagctacttgggaagcagaggctggaggatcatttcagcccaggaggttgtggatacagtgagttatgacatgcccattcactacagcctggatgacaagcaagaccctccctccaaagaaaataaagctcaattaaaataaaatatgatttgtgttcatgtaaaaaaaa

SEQ ID NO: 182 - DNA, 4953 bp, Homo sapiens; identical to SEQ ID NO: 57
  ref <308>: DATABASE ACCESSION NUMBER: NCBI / NM_001746
  ref <309>: DATABASE ENTRY DATE: 2011-11-20
  ref <313>: RELEVANT RESIDUES IN SEQ ID NO: (1)..(4953)

SEQ ID NO: 183 - DNA, 1096 bp, Homo sapiens
  ref <308>: DATABASE ACCESSION NUMBER: NCBI / NM_001662
  ref <309>: DATABASE ENTRY DATE: 2011-11-28
  ref <313>: RELEVANT RESIDUES IN SEQ ID NO: (1)..(1096)
cgggcccgcggtgacgtcgggagggcagcgacgcgcggaggcggcggcggagcctcctcctgctgctgctgcgccccatccccccgcggccggccagttccagcccgcaccccgcgtcggtgcccgcgcccctccccgggccccgccatgggcctcaccgtgtccgcgctcttttcgcggatcttcgggaagaagcagatgcggattctcatggttggcttggatgcggctggcaagaccacaatcctgtacaaactgaagttgggggagattgtcaccaccatcccaaccataggcttcaatgtagaaacagtggaatataagaacatctgtttcacagtctgggacgtgggaggccaggacaagattcggcctctgtggcggcactacttccagaacactcagggcctcatctttgtggtggacagtaatgaccgggagcgggtccaagaatctgctgatgaactccagaagatgctgcaggaggacgagctgcgggatgcagtgctgctggtatttgccaacaagcaggacatgcccaacgccatgcccgtgagcgagctgactgacaagctggggctacagcacttacgcagccgcacgtggtatgtccaggccacctgtgccacccaaggcacaggtctgtacgatggtctggactggctgtcccacgagctgtcaaagcgctaaccagccaggggcaggcccctgatgcccggaagctcctgcgtgcatccccgggatgaccagactcccggactcctcaggcagtgccctttcctcccacttttcctcccccatagccacaggcctctgctcctgctcctgcctgcatgttctctctgttgttggagcctggagccttgctctctgggcacagaggggtccactctcctgcctgctgggacctatggaaggggcttcctggccaaggccccctcttccagaggaggagcagggatctgggtttccttttttttttctgttttgggtgtactctaggggccaggttgggagggggaaggtgagggcttcgggtggtgctataatgtggcactggatcttgagtaataaatttgctgtggtttgtacacgg

SEQ ID NO: 184 - DNA, 1758 bp, Homo sapiens
  ref <308>: DATABASE ACCESSION NUMBER: NCBI / NM_001660
  ref <309>: DATABASE ENTRY DATE: 2011-11-26
  ref <313>: RELEVANT RESIDUES IN SEQ ID NO: (1)..(1758)
gcgcaccggaagcgcagggggatggggcggcggtgacgcgattctgtccgcgttggaggggccgggccgctgctggagtcgccgcggccgccgcgtgacgtggcacagccagagcctaaaggctagagccggagctgccgcgccagtcgcctagcaggtcctctaccggcttattcctgtgccggatcttcatcggcacaggggccactgagacgtttctgcctccctctttcttcctccgctctttctcttccctctcgtttagtttgcctgggagcttgaaaggagaaagcacggggtcgccccaaaccccttctgcttctgcccatcacaagtgccactaccgccatgggcctcactatctcctccctcttctcccgactatttggcaagaagcagatgcgcattttgatggttggattggatgctgctggcaagacaaccattctgtataaactgaagttaggggagatagtcaccaccattcctaccattggttttaatgtggaaacagtagaatataagaacatttgtttcacagtatgggatgttggtggtcaagatagaattaggcctctctggaagcattacttccagaatacccagggtcttatttttgtggtagatagcaacgatcgtgaaagaattcaggaagtagcagatgagctgcagaaaatgcttctggtagatgaattgagagatgcagtgctgctactttttgcaaacaaacaggatttgccaaatgctatggccatcagtgaaatgacagataaactagggcttcagtctcttcgtaacagaacatggtatgttcaagccacttgtgcaacacaaggaactggtctgtatgaaggacttgactggctgtcaaatgagctttcaaaacgttaaatgaaattggatatctaaccaaggacatgtttgataaaattggtctaggcttgttacaacaaaattagtttgtatcttggttattaaacagtatctgggactggtttgggcagaatattaaacttattttgttgccaattattgtttaccgagtataatgttgctatttagcaatgtgcttggttttaaagaaattctccttgggaaaaaagtatcctcttttaattttacttcccataagcgtaaatgcctggacatagctcttgtgcaacctttaaataaattgttttgagtgttttttgagccccagacaaataatgttttaaagttatccccttgctactttactgatacctttatcattcctgagacagtttgctaatttaaaaatgtagcattccatttgtatttatttctctcccttgccaaaaagattttctaatactgcttgtaccagccagagaaagatccaaaacactactcagctctcttgcactgaggaaatttttccccctacattgactcctggcctacatcagccaaacttaaccttggtggggtttggatttgatagccaattagttctgtgctggttgcaaagaattgatatttagatggtttttaatactcagcagattgtcttcctttatattgtgtcttttttatgttgcatgttgcttttgttatcagcctgattttttgctcagtatatgatagttctgctgatgttttgtttattgggcagacatatcttcattaagagtttttggaaaactcatcaaattcgatgaatacattttcttcataacccatttggaattattcctaataaaatgataaaatacgtaaaaaaaaaaaaaaaaaaaa

SEQ ID NO: 185 - DNA, 1901 bp, Homo sapiens
  ref <308>: DATABASE ACCESSION NUMBER: NCBI / NM_001658
  ref <309>: DATABASE ENTRY DATE: 2011-12-17
  ref <313>: RELEVANT RESIDUES IN SEQ ID NO: (1)..(1901)
ccttacccggcgtgccccgcgcccggaggcgctgacgtggccgccgtcagagccgccatcttgtgggagcaaaaccaacgcctggctcggagcagcagcctctgaggtgtccctggccagtgtccttccacctgtccacaagcatggggaacatcttcgccaacctcttcaagggcctttttggcaaaaaagaaatgcgcatcctcatggtgggcctggatgctgcagggaagaccacgatcctctacaagcttaagctgggtgagatcgtgaccaccattcccaccataggcttcaacgtggaaaccgtggagtacaagaacatcagcttcactgtgtgggacgtgggtggccaggacaagatccggcccctgtggcgccactacttccagaacacacaaggcctgatcttcgtggtggacagcaatgacagagagcgtgtgaacgaggcccgtgaggagctcatgaggatgctggccgaggacgagctccgggatgctgtcctcctggtgttcgccaacaagcaggacctccccaacgccatgaatgcggccgagatcacagacaagctggggctgcactcactacgccacaggaactggtacattcaggccacctgcgccaccagcggcgacgggctctatgaaggactggactggctgtccaatcagctccggaaccagaagtgaacgcgacccccctccctctcactcctcttgccctctgctttactctcatgtggcaaacgtgcggctcgtggtgtgagtgccagaagctgcctccgtggtttggtcaccgtgtgcatcgcaccgtgctgtaaatgtggcagacgcagcctgcggccaggctttttatttaatgtaaatagtttttgtttccaatgaggcagtttctggtactcctatgcaatattactcagctttttttattgtaaaaagaaaaatcaactcactgttcagtgctgagaggggatgtaggcccatgggcacctggcctccaggagtcgctgtgttgggagagccggccacgcccttggctttagagctgtgttgaaatccattttggtggttggtttttaacccaaactcagtgcattttttaaaatagttaagaatccaagtcgagaacacttgaacacacagaagggagaccccgcctagcatagatttgcagttacggcctggatgccagtcgccagcccagctgttcccctcgggaacatgaggtggtggtggcgcagcagactgcgatcaattctgcatggtcacagtagagatccccgcaactcgcttgtccttgggtcaccctgcattccatagccatgtgcttgtccctgtgctcccacggttcccaggggccaggctgggagcccacagccaccccactatgccgcaggccgccctacccaccttcaggcagcctatgggacgcagggccccatctgtccctcggtcgccgtgtggccagagtgggtccgtcgtccccaacactcgtgctcgctcagacactttggcaggatgtctggggcctcaccagcaggagcgcgtgcaagccgggcaggcggtccacctagacccacagcccctcgggagcaccccacctctgtgtgtgatgtagctttctctccctcagcctgcaagggtccgatttgccatcgaaaaagacaacctctacttttttcttttgtattttgataaacactgaagctggagctgttaaatttatcttggggaaacctcagaactggtctatttggtgtcgtggaacctcttactgctttcaatacacgattagtaatcaactgttttgtatacttgttttcagttttcatttcgacaaacaagcactgtaattatagctattagaataaaatctcttaactatttcaaaaaaaaaaaaaa

SEQ ID NO: 186 - DNA, 1363 bp, Homo sapiens
  ref <308>: DATABASE ACCESSION NUMBER: NCBI / NM_003313
  ref <309>: DATABASE ENTRY DATE: 2011-11-26
  ref <313>: RELEVANT RESIDUES IN SEQ ID NO: (1)..(1363)
ggccccgccccccacctggctccgcgggcagccggagcgcacccggccggaagccgctgtcggggagccggcggtggggctggacgcaggtgcaactgacatgggtgaaccccagggatccatgcggattctagtgacagggggctctgggctggtaggcaaagccatccagaaggtggtagcagatggagctggacttcctggagaggactgggtgtttgtctcctctaaagacgccgatctcacggatacagcacagacccgcgccctgtttgagaaggtccaacccacacacgtcatccatcttgctgcaatggtggggggcctgttccggaatatcaaatacaatttggacttctggaggaaaaacgtgcacatgaacgacaacgtcctgcactcggcctttgaggtgggcgcccgcaaggtggtgtcctgcctgtccacctgtatcttccctgacaagacgacctacccgatagatgagaccatgatccacaatgggcctccccacaacagcaattttgggtactcgtatgccaagaggatgatcgacgtgcagaacagggcctacttccagcagtacggctgcaccttcaccgctgtcatccccaccaacgtcttcgggccccacgacaacttcaacatcgaggatggccacgtgctgcctggcctcatccacaaggtgcacctggccaagagcagcggctcggccctgacggtgtggggtacagggaatccgcggaggcagttcatatactcgctggacctggcccagctctttatctgggtcctgcgggagtacaatgaagtggagcccatcatcctctccgtgggcgaggaagatgaggtctccatcaaggaggcagccgaggcggtggtggaggccatggacttccatggggaagtcacctttgatacaaccaagtcggatgggcagtttaagaagacagccagtaacagcaagctgaggacctacctgcccgacttccggttcacacccttcaagcaggcggtgaaggagacctgtgcttggttcactgacaactacgagcaggcccggaagtgaagctggaagacaggatcaggtgccagcggaccatcggctggcagagcccagcggccaccacccgtcaaccctgccaggagctgagggcaccacccagcaacctgggcctgcattccatccgctctgcagccccaagcatctttccagtggggcccccattcacgttggtcctcagggaaaccagggtcccgggcaggcccggcgctttgctccccacaccagccccctgcgcgtgtccactctgatcctgcatcccactccctgggagccaataaagtgcattttcacaggcaaaaa

SEQ ID NO: 187 - DNA, 2441 bp, Homo sapiens
  ref <308>: DATABASE ACCESSION NUMBER: NCBI / NM_001494
  ref <309>: DATABASE ENTRY DATE: 2011-11-26
  ref <313>: RELEVANT RESIDUES IN SEQ ID NO: (1)..(2441)
agagtgccgggagcgcctgattggcggccctcccggcgcctgcaggccccgccccggctgcggaggctcagtcacagccctcccctcctcgctccctcccctcctctccccgcccagttcttctcttcccgtctgaggtggcggtcggtctcgccttgtcgccagctccattttcctctctttctcttcccctttccttcgcgcccaagagcgcctcccagcctcgtagggtggtcacggagcccctgcgccttttccttgctcgggtcctgcgtccgcgcctgccccgccatgaatgaggagtacgacgtgatcgtgctgggcaccggcctgacggaatgtatcctgtcaggtataatgtcagtgaatggcaagaaagttcttcatatggatcgaaacccttactacggaggagagagtgcatctataacaccattggaagatttatacaaaagatttaaaataccaggatcaccacccgagtcaatggggagaggaagagactggaatgttgacttgattcccaagttccttatggctaatggtcagctggttaagatgctgctttatacagaggtaactcgctatctggattttaaagtgactgaagggagctttgtctataagggtggaaaaatctacaaggttccttccactgaagcagaagccctggcatctagcctaatgggattgtttgaaaaacgtcgcttcaggaaattcctagtgtatgttgccaacttcgatgaaaaagatccaagaacttttgaaggcattgatcctaagaagaccacaatgcgagatgtgtataagaaatttgatttgggtcaagacgttatagattttactggtcatgctcttgcactttacagaactgatgattacttagatcaaccgtgttatgaaaccattaatagaattaaactttacagtgaatctttggcaagatatggcaaaagcccatacctttatccactctatggccttggagaactgccccaaggatttgcaaggctaagtgctatttatggaggtacctatatgctgaataaacccattgaagaaatcattgtacagaatggaaaagtaattggtgtaaaatctgaaggagaaattgctcgctgtaagcagctcatctgtgaccccagctacgtaaaagatcgggtagaaaaagtgggccaggtgatcagagttatttgcatcctcagccaccccatcaagaacaccaatgatgccaactcctgccagatcattattccacagaaccaagtcaatcgaaagtcagatatctacgtctgcatgatctcctttgcgcacaatgtagcagcacaagggaagtacattgctatagttagtacaactgtggaaaccaaggagcctgagaaggaaatcagaccagctttggagctcttggaaccaattgaacagaaatttgttagcatcagtgacctcctggtaccaaaagacttgggaacagaaagccagatctttatttcccgcacatatgatgccaccactcattttgagacaacgtgtgatgacattaaaaacatctataagaggatgacaggatcagagtttgactttgaggaaatgaagcgcaagaagaatgacatctatggggaagactaacagcagtacatgttattatgtaattaggacacatttaaaatttggcaaataatgcatataatgaaatcaatattgtaaggcctgcttttgtaatgaaaatggagagaatgaagagcgctgtgccagtaaatactccccttcacctttctaattattaacttgttttcatggagtggctattcagcattggcagttaccacattctgttcaatttaaccaaactggctttttttttttctagtgaagttaaacaaacattgggataccgacacagacaacttgagacagtttttttaatcttttaatcagtgtagctatgtgctgctgctgctcaagagctggatccatacaggttgtgtgtcatctgtcctcttgaggttcaggagattctaaattgaatattccacggtttgggacagcatccggaagttttccctatgactttatattttgtattatgtcaaatgttatggcagggcccaaatagcatagccacaagtttggtttatgtgggcataaaattctaaccaaaccccagacatagggagtcatttggagaaagcctgtatgtggtgttttaacctaataaagttgatgagagagaaggggagaggaagcgaacataaagcgggtcaagtgtagtgcatcttttgtatctcaggcgtggcttcttcagtggaccaagctgcaatgcagtattgacttgacagagcctctacttctgtctcaaaatggctccaaatgatttctgtactgcaaaataaagccaaattctggaaactaaaaaaaaaaaaaaaaaaaaaaaaaaaaaa

SEQ ID NO: 188 - DNA, 1152 bp, Homo sapiens
  ref <308>: DATABASE ACCESSION NUMBER: NCBI / NM_003145
  ref <309>: DATABASE ENTRY DATE: 2011-10-22
  ref <313>: RELEVANT RESIDUES IN SEQ ID NO: (1)..(1152)
agtgcttatttccggtctttcggatgctgacgctctcttcctgtctttgtggctccggaaaggcgtttgggatgccaacgatgaggctgctgtcatttgtggtgttggctctatttgctgtcactcaagcagaggaaggagccaggcttttggcttccaaatcactgctgaacagatacgccgtggagggacgagacctgaccttgcagtacaacatctacaatgttggctcaagtgctgcattagacgtggaactatctgatgattccttccctccagaagactttggcattgtgtctggaatgctcaatgtcaaatgggaccggattgcccctgctagcaatgtctcccacactgtggtcctgcgccctctcaaggctggttatttcaacttcacctcggcaacaattacttacctggcccaggaggatgggcccgttgtgattggctctaccagtgcacctggacagggaggaatcctggctcagcgggagtttgacaggcgattctcccctcattttctggactgggcagcctttggggtcatgacccttccctccatcggcatccccctgctattgtggtactccagcaagaggaaatatgacactcccaaaacgaagaagaactgattggggcttccacagccctcctctcccaagaaatccaggctcctctcccaagaaatccaggtgctttccagactccaaagggtatcttaaatgcaatctcttctctcttagcccttggccactttctcctggatcctgccctgctctcagccatagtgaaggaccagccctaggagtctgcgagagcctccttggttccatcgtgaagccataaacaggaatgcctttggcaatagccttgagcctagagggccctctgatgccccactgaggtgctgttggtttattgctggcaacgtgaattctctcaggggtctaggaggggcattttggagactgcctgacaccacccctatcccctgcctccccctctcagaagagggtggaagatgaaatgaaagctatgggactcttggaggatacccagtgtctattctgggttagagaagtgcttactaaggggttttctaataaaaacaaatgccacattgaaaaaaaaaaaaaaaaaaaaaaaaaaaaa

SEQ ID NO: 189 - DNA, 3478 bp, Homo sapiens
  ref <308>: DATABASE ACCESSION NUMBER: NCBI / NM_001619
  ref <309>: DATABASE ENTRY DATE: 2011-12-18
  ref <313>: RELEVANT RESIDUES IN SEQ ID NO: (1)..(3478)
cgggcgcgcgggcggcggcggcggcggcgccccgactgcagtcccggcgggagcggagcgcgagccggggccgggcccgagccggcgccatggggcggcgccgcctgtgagcggcggcgagcggagccgcgggcgccgagcagggccaggcgggaggcgtcggcgcccgaggccgagcgagccgcggccgggccgggccgagcgccgagcgagcaggagcggcggcggcggcggcggcggcgggaggaggcagcgccgccgccaagatggcggacctggaggcggtgctggccgacgtgagctacctgatggccatggagaagagcaaggccacgccggccgcgcgcgccagcaagaagatcctgctgcccgagcccagcatccgcagtgtcatgcagaagtacctggaggaccggggcgaggtgacctttgagaagatcttttcccagaagctggggtacctgctcttccgagacttctgcctgaaccacctggaggaggccaggcccttggtggaattctatgaggagatcaagaagtacgagaagctggagacggaggaggagcgtgtggcccgcagccgggagatcttcgactcatacatcatgaaggagctgctggcctgctcgcatcccttctcgaagagtgccactgagcatgtccaaggccacctggggaagaagcaggtgcctccggatctcttccagccatacatcgaagagatttgtcaaaacctccgaggggacgtgttccagaaattcattgagagcgataagttcacacggttttgccagtggaagaatgtggagctcaacatccacctgaccatgaatgacttcagcgtgcatcgcatcattgggcgcgggggctttggcgaggtctatgggtgccggaaggctgacacaggcaagatgtacgccatgaagtgcctggacaaaaagcgcatcaagatgaagcagggggagaccctggccctgaacgagcgcatcatgctctcgctcgtcagcactggggactgcccattcattgtctgcatgtcatacgcgttccacacgccagacaagctcagcttcatcctggacctcatgaacggtggggacctgcactaccacctctcccagcacggggtcttctcagaggctgacatgcgcttctatgcggccgagatcatcctgggcctggagcacatgcacaaccgcttcgtggtctaccgggacctgaagccagccaacatccttctggacgagcatggccacgtgcggatctcggacctgggcctggcctgtgacttctccaagaagaagccccatgccagcgtgggcacccacgggtacatggctccggaggtcctgcagaagggcgtggcctacgacagcagtgccgactggttctctctggggtgcatgctcttcaagttgctgcgggggcacagccccttccggcagcacaagaccaaagacaagcatgagatcgaccgcatgacgctgacgatggccgtggagctgcccgactccttctcccctgaactacgctccctgctggaggggttgctgcagagggatgtcaaccggagattgggctgcctgggccgaggggctcaggaggtgaaagagagcccctttttccgctccctggactggcagatggtcttcttgcagaagtaccctcccccgctgatccccccacgaggggaggtgaacgcggccgacgccttcgacattggctccttcgatgaggaggacacaaaaggaatcaagttactggacagtgatcaggagctctaccgcaacttccccctcaccatctcggagcggtggcagcaggaggtggcagagactgtcttcgacaccatcaacgctgagacagaccggctggaggctcgcaagaaagccaagaacaagcagctgggccatgaggaagactacgccctgggcaaggactgcatcatgcatggctacatgtccaagatgggcaaccccttcctgacccagtggcagcggcggtacttctacctgttccccaaccgcctcgagtggcggggcgagggcgaggccccgcagagcctgctgaccatggaggagatccagtcggtggaggagacgcagatcaaggagcgcaagtgcctgctcctcaagatccgcggtgggaaacagttcattttgcagtgcgatagcgaccctgagctggtgcagtggaagaaggagctgcgcgacgcctaccgcgaggcccagcagctggtgcagcgggtgcccaagatgaagaacaagccgcgctcgcccgtggtggagctgagcaaggtgccgctggtccagcgcggcagtgccaacggcctctgacccgcccacccgccttttataaacctctaatttattttgtcgaatttttattatttgttttcccgccaagcggaaaaggttttattttgtaattattgtgatttcccgtggccccagcctggcccagctcccccgggaggggcccgcttgcctcggctcctgctgcaccaacccagccgctgcccggcgccctctgtcctgacttcaggggctgcccgctcccagtgtcttcctgtgggggaagagcacagccctcccgccccttccccgagggatgatgccacaccaagctgtgccaccctgggctctgtgggctgcactctgtgcccatgggcactgctgggtggcccatcccccctcaccaggggcaggcacagcacagggatccgacttgaattttcccactgcaccccctcctgctgcagaggggcaggccctgcactgtcctgctccacagtgttggcgagaggaggggcccgttgtctccctggccctcaaggcctcccacagtgactcgggctcctgtgcccttattcaggaaaagcctctgtgtcactggctgcctccactcccacttccctgacactgcggggcttggctgagagagtggcattggcagcaggtgctgctaccctccctgctgtcccctcttgccccaacccccagcacccgggctcagggaccacagcaaggcacctgcaggttgggccatactggcctcgcctggcctgaggtctcgctgatgctgggctgggtgcgaccccatctgcccaggacggggccggccaggtgggcgggcagcacagcaaggaggctggctggggcctatcagtgtgccccccatcctggcccatcagtgtacccccgcccaggctggccagccccacagcccacgtcctgtcagtgccgccgcctcgcccaccgcatgccccctcgtgccagtcgcgctgcctgtgtggtgtcgcgccttctcccccccggggctgggttggcgcaccctcccctcccgtctactcattccccggggcgtttctttgccgatttttgaatgtgattttaaagagtgaaaaatgagactatgcgtttttataaaaaatggtgcctgattaaaaaaaaaaaaaaaaaaaaaaaaaaaaaaaaaa

SEQ ID NO: 190 - DNA, 4682 bp, Homo sapiens
  ref <308>: DATABASE ACCESSION NUMBER: NCBI / NM_001420
  ref <309>: DATABASE ENTRY DATE: 2011-11-20
  ref <313>: RELEVANT RESIDUES IN SEQ ID NO: (1)..(4682)
ggacttgaacacacgggaccggacaggaccgaccgaggggcggcggcgaaaggcagagcgccgcgatctctgtcgggaagcgcaacctccccgggccccgcggggccgcgcagggggcgtcctcaaccccgcgcccgctccctctttccatcccctgccgcccgcaggccaccccggggcccggccatccgcgcgcgcatccccgggttcgggcccgtccctggccctcgagggagccgccgccttcatcgccacatctgcagcggccgcaccagaggccgcccgggcgggaccccagcgtgagcatcgggcgcccccctaggagtgcaccacccccggagcccccctcaacacggaccgcgcccgccgggcacacaagaatggtcactcagatactgggggccatggagtctcaggtgggggggggcccggccggcccggccctgcccaacgggccactccttggtacaaatggagccactgacgacagcaagaccaacctcatcgtcaactacctgccccagaacatgacccaggatgagttcaagagtctcttcggcagcattggcgacatcgagtcctgcaagttggttcgggacaagatcacagggcagagccttggctacgggtttgtgaactattctgaccccaatgatgcagacaaagccatcaacaccctcaacggcctcaaattacagacgaagaccatcaaggtgtcctatgccagacccagttcagcatccatccgggatgctaacctgtacgtcagcgggctccccaagaccatgagccagaaagagatggagcagctcttctcccagtacggccgcatcatcacgtcccgcatcctggtggaccaggtcacaggtgtctctcggggtgtgggattcatccgctttgacaagaggattgaggccgaagaggctatcaaaggactgaatgggcagaagccgctgggcgcagctgagcccatcacagtcaagttcgcgaacaacccaagtcagaagacggggcaggcgctgctcacccacctctaccagtcatccgcccggcgctacgcaggccccctacaccatcagacccagcgtttccggctggacaatttgctcaacatggcctacggcgtcaagagtcccctgtcgctcatcgccaggttctcgccgatcgccatcgatggtatgagcggcctggcgggcgtgggcctgtcggggggcgcggcgggcgccggctggtgcatcttcgtgtacaacctgtcaccggaggcagacgagagcgtgctgtggcagctgttcgggccttttggggcagtcaccaacgtcaaggtcatccgtgatttcaccaccaacaagtgcaagggtttcggcttcgtgaccatgaccaactatgacgaggcggccatggccatcgccagcctgaacggctatcgcctgggcgagcgcgtgctgcaggtctccttcaagaccagcaaacagcacaaggcgtgagcccaccccgcctgccctcccaccccctccccgggcagcagagagagagagagagaaagagagagagagagagagaaggggcccaagagagacagcacaggcagccccacggacgacgcgagggccccacgtccctgcggaagccacagggtgagcactctggggtgggagggtctgcagggaattgggggggtgcccggggatcccccgccccatcctcctgcccccaccccaggctgggctgttcactctctcgtcttggtttggttcatggtgaaggtttttgtttcttttttcggctaaaaagaatgcagagatgtgcccccacccccaccctcgaccacccccgatgggatggcttggggggctccagggggtgccctcccagacccccttgcccaggcctccccagcacctaggtggggcctggggtaggaggaacaggtttaaaaatccccaaaaaagcgaaccgtgaggaggggtgtgggcacccccggcccagtgccccctggtggaatgcgggggagcaggcagtggggctggaagcagaaacaaaatgaaaaaaaaaggggggtgggaggggaagaaaaactctatttttgtaaaaagggaaaaagacctcgtggagaatttttactggggattcttgaacttgaaaaaaaaaaacacaaaaaaagacaaaaaaaaaaaaagaaaatattttggcaggttatgtttaccaactggggcgggggtggggggggcccagggagcagggcttaggggctagcagcccacggggccacacagagaaacaaccacgcagacagtcacaccacggggacacacggacagacgcagacggacacagcgacatgccccagacacgttaagggactggttggccaaactcagacacgtggacagggatagacagaaagagacagaagctggggctacgtccatgtggacacagaccacagatgtgggcacacgaatccatccacctgtccacgtgcacacgtgaatgtagcgatagatatttggacatcaaatttggacaccaggtcacggagaaacacaaacaccacccaggaacacgcagacatatgcccatagcatcccacaggcccaggcaggaggtcccaccccagaccctgccccagacgctccctcaccctctcggccccctcgccctggcccccaggttctctgcagagatctctcctggacccccagcggtctccttggcgcccacgaacacaggcgtgcacacgcagcgcacatgcattgagacacacgatacctcgttccaccttggcgtcacggtgggctggaggcagcccccccccccacaacacttgaggccaaaggacacccctgtccccggggctcagcctccccctgggccgaggccttggcccacacagctgagggagaggcccagccctgagcctcccccaccaggactgggcctccccggcagcaagaccccggcactccccgccaggcccagggtggggtggatgggcccaaaggcccagccccacactcctttcccgtccacttgtcacctacctatcccctttcggtttgttgggtttttcgtctttccagattgcagtggacacagcccccgatctcgagccccggcccccggcttctgtctggacattgcatcgccctagttttctttctttaaaaaaaaaaaattccaacagaagccacaggccggagcccctgggagccctcgcaccgctccccaccccactcagcggccccatcggaactgagaattgcaaaacccccgactttagctatagttaagttgccttcccccggtgtccccacgtttggtgtctggctatggcgcccccatctgactgtccagctctctctcccccacccctcccggtgttgttattaaacgtctgtggagcttctgctgcaaggaacaaaaaagaaaaaaatcaaaaaagcgacaaaaaaacacaaacagaagaggaaaaaaaagcaacaaaaaaagaaaacacacagaagagatttaaaaaaaaaaaaggaaaaaaaaaaaagacataaactggcaccagttaactttcttgtacttttttgctgaatttagcttcttgtagttttaacttattgctatgttaactatttattctcctcgttgccctgtaaggacatccgtgtatatttctgttacttcatccggtttgcaagttaaaggaacgacaatgttctctttgtttctttaagttttgccgagacatggttatgcctaatttatttataaaaggggaagtggaatcattaaagtaataataattattaataacagtaatggtagccgagtggcacgcgggggcgtgtgctctgcgggacagtccccacggccagcgacgtccaggtcaccaatgggattctttttgctcttgtcttgagaattttttcagtcctatttagctggtgaaatccctagcttgttcttgatacacgaacctatttattctcgtggttttaagtcctccctgccctctctcctctcccctgcagcagggcagggacccctctcccctgctgtctcttggggctctctcccctccgccctctgcattcgggaacacgcacgtccgcgtgggaagcttgcagcagggcgtccgagcaataagggctgggtttgtcccccaccctggggggggccaggctccagagagggggcacctccccacacaccccccccccaccgaggcctaggcccctgccacccccaagactgggaggggacttctttttctaaaacacaaaactcagcccagccaggccccctccctggaggccagcccctccccgcagggggccaggccggggctcccaggcgagggggacttggggcttccacgtccctggggggcaggggccaggccaggggggagggggctcagcccctccacccctcccttcatcctgttatttattcggaaggtttcaaatcacgacagagtccatgttggaggtgataaaaaactgtaaaaaaaaaaaaaaaaaaaaagacaaaacaaaagacaaaaaaaaaaaaaaaacccaacaagaacacttcgcgttgcgtttagactatttattaccgggatcacaggcctggccgcggtaacagacttttacatggaattgtttaattatttgtacttttcatgccagaaaataaaagttcagaatctt

SEQ ID NO: 191 - DNA, 1728 bp, Homo sapiens
  ref <308>: DATABASE ACCESSION NUMBER: NCBI / NM_004930
  ref <309>: DATABASE ENTRY DATE: 2011-12-19
  ref <313>: RELEVANT RESIDUES IN SEQ ID NO: (1)..(1728)
gcccggcgcggggggaggggggtgctgacccggatgttcactcctgggcacccggggaagtggaagcgccgggccctgctgcgggggggagagccactgacgccgggaccgggaccgccgccgccgccgccaccatgagtgatcagcagctggactgtgccttggacctaatgaggcgcctgcctccccagcaaatcgagaaaaacctcagcgacctgatcgacctggtccccagtctatgtgaggatctcctgtcttctgttgaccagccactgaaaattgccagagacaaggtggtgggaaaggattaccttttgtgtgactacaacagagatggggactcctataggtcaccatggagtaacaagtatgaccctcccttggaggatggggccatgccgtcagctcggctgagaaagctggaggtggaagccaacaatgcctttgaccagtatcgagacctgtattttgaaggtggcgtctcatctgtctacctctgggatctggatcatggctttgctggagtgatcctcataaagaaggctggagatggatcaaagaagatcaaaggctgctgggattccatccacgtggtagaagtgcaggagaaatccagcggtcgcaccgcccattacaagttgacctccacggtgatgctgtggctgcagaccaacaaatctggctctggcaccatgaacctcggaggcagccttaccagacagatggagaaggatgaaactgtgagtgactgctccccacacatagccaacatcgggcgcctggtagaggacatggaaaataaaatcagaagtacgctgaacgagatctactttggaaaaacaaaggatatcgtcaatgggctgaggtctgtgcagacttttgcagacaaatcaaaacaagaagctctgaagaatgacctggtggaggctttgaagagaaagcagcaatgctaaacctctgtttcatgctaaccagacacgccgtgcactcgttagattcctttcttagaaaactcgttttctgctcccttccctcgtcccttccctccccgacaggtcacataacagctgcatcattgaccgcacagcgccatctctccctgagaataaagccgatagccaccctcctccggctccgagcctgcttctgccacacctcgctctcagttctctccacatttccatagagaccgtgtggtttttgttcacccgggccccccgtcttcctccctgtccccccatttataggcataaaatccactgtctgccagcctcccttccctcccacctttttggtacattggtgtaaaaaatgtaaaacaaaaaaattttatgaactaactgtggtgtgtgaaagagagaagaaaaactggaaatcttattccgtgtgtgtttgggagttgcttggggttgggggtcgtggggacaggggacagctctgggagcagaggtggccctcggtgccgtcctgcgcagactctcccgtcccacggaggccgcggggtgggggctggggggggtgccgccgaccgttccgctcttccggccaggtgcttttctgtcaatttctatggaatgcaaaaggaggtttttgttttattttgtttttttgtaaagcttaagaaaaaaatctacatcttatacttgagcctccatacttaaaaaaagaaaagaaaagaaatcaataaaaagaaactggggcgcagttagcaaaaaaaaaaaaaaaaaa

SEQ ID NO: 192 - DNA, 1646 bp, Homo sapiens
  ref <308>: DATABASE ACCESSION NUMBER: NCBI / NM_004596
  ref <309>: DATABASE ENTRY DATE: 2011-12-04
  ref <313>: RELEVANT RESIDUES IN SEQ ID NO: (1)..(1646)
ggcggggccaggagagaaagctttgtggtttggtctcagggaagtagcaggcgccggttgagagaactacggccctgtcggaaggtaacctccggtgcaaacgaccatcggcggcaggcgagcggtacgcttggcgtccgggccttcctgggcccgtctgaggaaacttgctgctcgaggccaggctgcctaggacctgtcccttttttctatactggctcccacatccgggttttttctccgggacggcccttcggatgcttgggccaatgggaatcgccatttagggtgctccgcccaccgggtcgcgtagagcatcctggaagtcgtagtaaatctctcgagagttctctccgcacgcgggctggagaagcgggtcctacgcacgctttgttgtcgcgctttgcctccgtccttgcccctactcccgccttacctgacttccttttcggaggaagatccttgagcagccgacgttgggacaaaggatttggagaaacccagggctaaagtcacgtttttcctcctttaagacttacctcaacacttcactccatggcagttcccgagacccgccctaaccacactatttatatcaacaacctcaatgagaagatcaagaaggatgagctaaaaaagtccctgtacgccatcttctcccagtttggccagatcctggatatcctggtatcacggagcctgaagatgaggggccaggcctttgtcatcttcaaggaggtcagcagcgccaccaacgccctgcgctccatgcagggtttccctttctatgacaaacctatgcgtatccagtatgccaagaccgactcagatatcattgccaagatgaaaggcaccttcgtggagcgggaccgcaagcgggagaagaggaagcccaagagccaggagaccccggccaccaagaaggctgtgcaaggcgggggagccacccccgtggtgggggctgtccaggggcctgtcccgggcatgccgccgatgactcaggcgccccgcattatgcaccacatgccgggccagccgccctacatgccgccccctggtatgatccccccgccaggccttgcacctggccagatcccaccaggggccatgcccccgcagcagcttatgccaggacagatgccccctgcccagcctctttctgagaatccaccgaatcacatcttgttcctcaccaacctgccagaggagaccaacgagctcatgctgtccatgcttttcaatcagttccctggcttcaaggaggtccgtctggtacccgggcggcatgacatcgccttcgtggagtttgacaatgaggtacaggcaggggcagctcgcgatgccctgcagggctttaagatcacgcagaacaacgccatgaagatctcctttgccaagaagtagcaccttttccccccatgcctgccccttcccctgttctggggccacccctttcccccttggctcagccccctgaaggtaagtccccccttgggggccttcttggagccgtgtgtgagtgagtggtcgccacacagcattgtacccagagtctgtccccagacattgcacctggcgctgttaggccggaattaaagtggctttttgaggtttggtttttcacaatcaaaaaaaaaaaaaaaaaa

SEQ ID NO: 193 - DNA, 2405 bp, Homo sapiens
  ref <308>: DATABASE ACCESSION NUMBER: NCBI / NM_004168
  ref <309>: DATABASE ENTRY DATE: 2011-11-12
  ref <313>: RELEVANT RESIDUES IN SEQ ID NO: (1)..(2405)
tccggcgtggtgcgcaggcgcggtatcccccctcccccgccagctcgaccccggtgtggtgcgcaggcgcagtctgcgcagggactggcgggactgcgcggcggcaacagcagacatgtcgggggtccggggcctgtcgcggctgctgagcgctcggcgcctggcgctggccaaggcgtggccaacagtgttgcaaacaggaacccgaggttttcacttcactgttgatgggaacaagagggcatctgctaaagtttcagattccatttctgctcagtatccagtagtggatcatgaatttgatgcagtggtggtaggcgctggaggggcaggcttgcgagctgcatttggcctttctgaggcagggtttaatacagcatgtgttaccaagctgtttcctaccaggtcacacactgttgcagcacagggaggaatcaatgctgctctggggaacatggaggaggacaactggaggtggcatttctacgacaccgtgaagggctccgactggctgggggaccaggatgccatccactacatgacggagcaggcccccgccgccgtggtcgagctagaaaattatggcatgccgtttagcagaactgaagatgggaagatttatcagcgtgcatttggtggacagagcctcaagtttggaaagggcgggcaggcccatcggtgctgctgtgtggctgatcggactggccactcgctattgcacaccttatatggaaggtctctgcgatatgataccagctattttgtggagtattttgccttggatctcctgatggagaatggggagtgccgtggtgtcatcgcactgtgcatagaggacgggtccatccatcgcataagagcaaagaacactgttgttgccacaggaggctacgggcgcacctacttcagctgcacgtctgcccacaccagcactggcgacggcacggccatgatcaccagggcaggccttccttgccaggacctagagtttgttcagttccaccctacaggcatatatggtgctggttgtctcattacggaaggatgtcgtggagagggaggcattctcattaacagtcaaggcgaaaggtttatggagcgatacgcccctgtcgcgaaggacctggcgtctagagatgtggtgtctcggtccatgactctggagatccgagaaggaagaggctgtggccctgagaaagatcacgtctacctgcagctgcaccacctacctccagagcagctggccacgcgcctgcctggcatttcagagacagccatgatcttcgctggcgtggacgtcacgaaggagccgatccctgtcctccccaccgtgcattataacatgggcggcattcccaccaactacaaggggcaggtcctgaggcacgtgaatggccaggatcagattgtgcccggcctgtacgcctgtggggaggccgcctgtgcctcggtacatggtgccaaccgcctcggggcaaactcgctcttggacctggttgtctttggtcgggcatgtgccctgagcatcgaagagtcatgcaggcctggagataaagtccctccaattaaaccaaacgctggggaagaatctgtcatgaatcttgacaaattgagatttgctgatggaagcataagaacatcggaactgcgactcagcatgcagaagtcaatgcaaaatcatgctgccgtgttccgtgtgggaagcgtgttgcaagaaggttgtgggaaaatcagcaagctctatggagacctaaagcacctgaagacgttcgaccggggaatggtctggaacacggacctggtggagaccctggagctgcagaacctgatgctgtgtgcgctgcagaccatctacggagcagaggcacggaaggagtcacggggcgcgcatgccagggaagactacaaggtgcggattgatgagtacgattactccaagcccatccaggggcaacagaagaagccctttgaggagcactggaggaagcacaccctgtcctatgtggacgttggcactgggaaggtcactctggaatatagacccgtgatcgacaaaactttgaacgaggctgactgtgccaccgtcccgccagccattcgctcctactgatgagacaagatgtggtgatgacagaatcagcttttgtaattatgtataatagctcatgcatgtgtccatgtcataactgtcttcatacgcttctgcactctggggaagaaggagtacattgaagggagattggcacctagtggctgggagcttgccaggaacccagtggccagggagcgtggcacttacctttgtcccttgcttcattcttgtgagatgataaaactgggcacagctcttaaataaaatataaatgaacaaactttcttttatttccaaaaaaaaaaaaaaaaaa

SEQ ID NO: 194 - DNA, 1807 bp, Homo sapiens
  ref <308>: DATABASE ACCESSION NUMBER: NCBI / NM_004156
  ref <309>: DATABASE ENTRY DATE: 2010-03-05
  ref <313>: RELEVANT RESIDUES IN SEQ ID NO: (1)..(1807)
ggaggggagagaaagagcgagagaaggggaaagacaagtcgggagaggccggtaggcgtgaggcgggcctgaagcggcagcgggcggccttcgtccggcgagagctaggccgaggacccgcgccgcgctccccggcacctcaccgcgtccttcaccgactcccgcggcgcgcggccgggcggggaagggcggcggccgggctggggctcgggatccgcatcgggatcgggccgccatggacgacaaggcgttcaccaaggagctggaccagtgggtcgagcagctgaacgagtgtaagcagctgaacgagaaccaagtgcggacgctgtgcgagaaggcaaaggaaattttaacaaaagaatcaaatgtgcaagaggttcgttgccctgttactgtctgtggagatgtgcatggtcaatttcatgatcttatggaactctttagaattggtggaaaatcaccggatacaaactacttattcatgggtgactatgtagacagaggatattattcagtggagactgtgactcttcttgtagcattaaaggtgcgttatccagaacgcattacaatattgagaggaaatcacgaaagccgacaaattacccaagtatatggcttttatgatgaatgtctgcgaaagtatgggaatgccaacgtttggaaatattttacagatctctttgattatcttccacttacagctttagtagatggacagatattctgcctccatggtggcctctctccatccatagacacactggatcatataagagccctggatcgtttacaggaagttccacatgagggcccaatgtgtgatctgttatggtcagatccagatgatcgtggtggatggggtatttcaccacgtggtgctggctacacatttggacaagacatttctgaaacctttaaccatgccaatggtctcacactggtttctcgtgcccaccagcttgtaatggagggatacaattggtgtcatgatcggaatgtggttaccattttcagtgcacccaattactgttatcgttgtgggaaccaggctgctatcatggaattagatgacactttaaaatattccttccttcaatttgacccagcgcctcgtcgtggtgagcctcatgttacacggcgcaccccagactacttcctataaatttctcctgggaaacctgcctttgtatgtggaagtatacctggctttttaaaatatatgtatttaaaaacaaaaagcaacagtaatctatgtgtttctgtaacaaattgggatctgtcttggcattaaaccacatcatggaccaaatgtgccatactaatgatgagcatttagcacaatttgagactgaaatttagtacactatgttctaggtcagtctaacagtttgcctgctgtatttatagtaaccattttcctttggactgttcaagcaaaaaaggtaactaactgcttcatctccttttgcgcttatttggaaattttagttatagtgtttaactggcatggattaatagagttggagttttatttttaagaaaaattcacaagctaacttccactaatccattatcctttattttattgaaatgtataattaacttaactgaagaaaaggttcttcttgggagtatgttgtcataacatttaaagagatttcccttcatttaaactaaattactgttttatgttgatctgcatatttctgtatatttgtcatgacagtgcttgcatcctatttggtgtactcagcaaataaacttttcattttaaacaaaaacattcaaaaaaaaaaaaaaaaaa

SEQ ID NO: 195 - DNA, 4248 bp, Homo sapiens
  ref <308>: DATABASE ACCESSION NUMBER: NCBI / NM_004910
  ref <309>: DATABASE ENTRY DATE: 2011-10-15
  ref <313>: RELEVANT RESIDUES IN SEQ ID NO: (1)..(4248)
agggactgcaggggcgccggcgggcggatcgagaggaaggtcggggccatgggccggcactgcgcctcgggagggtccggccaccgctggaacccgaggccggggctgggggcgctccgggctccgacccacgggccggccggccctgcccgggctgggtgaggggcgcccgcctcaagctagaggaggagcggaggccgcgcgcggcccgccgagcgccttcaggatgctcatcaaggaataccacattctgctgcccatgagcctggacgagtaccaggtggcccagctctacatgatccagaaaaagagccgggaggagtctagtggtgagggcagcggcgtggagatcctggccaaccggccctacacggatgggcccgggggcagcgggcaatacacacacaaggtgtaccacgtgggctcccacatcccaggctggttccgggcactgctgcccaaggctgccctgcaggtagaagaggaatcctggaatgcctacccctacacccgaacccggtacacctgccctttcgtggagaaattctccattgaaattgagacctattacctgcctgatggggggcagcagccaaacgtcttcaacctgagcggggccgagaggagacagcgcatcctggacaccatcgacatcgtgcgggatgcagtggccccaggcgagtacaaagcagaagaggacccccggctttatcactcggtcaagacgggccgagggccactgtctgatgactgggcacggacggcggcacagacggggccccttatgtgtgcctataagctgtgcaaggttgagttccgctactggggcatgcaagccaagatcgagcagttcatccatgatgtaggtctgcgtcgggtgatgctgcgggcccaccgccaggcctggtgctggcaggatgagtggacagagctgagcatggctgacatccgggcactggaagaggagactgctcgcatgctggcccagcgcatggccaagtgcaacacaggcagtgaggggtccgaggcccagccccccgggaaaccgagcaccgaggcccggtctgcggccagcaacactggcacccccgatgggcctgaggcccccccaggcccagatgcctcccccgatgccagctttgggaagcagtggtcctcatcctcccgttcctcctactcatcccaacatggaggggctgtgtctccccagagcttgtctgagtggcgcatgcagaacattgcccgagactctgagaacagctccgaggaagagttctttgatgcccacgaaggcttctcggacagtgaggaggtcttccccaaggagatgaccaagtggaactccaatgacttcattgatgcctttgcctccccagtggaggcagagggaacgccagagcctggagccgaggcagctaaaggcattgaggatggggcccaagcacccagggactcagagggcctggatggagccggggagctgggggctgaggcatgcgcagtccacgccctcttccttatcctgcacagcggcaacatcctggactcaggccctggagacgccaactccaagcaggcggatgtgcagacgctgagctccgccttcgaggccgtcacccgcatccacttccctgaggccttgggccacgtggcgctgcgactggtgccctgtccacccatctgcgccgccgcctatgcccttgtctccaacctgagcccttacagccacgatggggacagcctgtctcgctcccaagaccacattccactggctgccctgccactgctggccacctcatcctcccgctaccagggcgccgtggccaccgtcattgcccgcaccaaccaggcctactcagccttcctgcgctcacctgagggtgccggcttctgtgggcaggtcgcactgattggagatggtgttggtggcatcctgggctttgatgcactctgccacagtgctaacgcgggcaccgggagtcggggcagcagccgccgtgggagcatgaacaatgagctgctctctccggagtttggcccagtgcgggaccccctggcagatggtgtggaaggcctgggtcggggcagcccagaaccctcggccttgcctccccagcgcatccccagcgacatggccagtcctgagcccgagggctctcagaacagccttcaggcagcccccgcaaccacctcctcctgggagccccggcgggcaagcacggccttctgcccacccgctgccagttccgaggcacctgacggccccagcagcactgcccgccttgacttcaaggtctctggcttcttcctcttcggctccccactgggcctggtgctggctctgcgcaaaactgtgatgcccgccctggaggcagcccagatgcgcccagcctgtgaacagatctacaacctcttccacgcggctgacccctgcgcctcacgcctcgagcccctgctggccccgaagttccaggccatcgccccactgaccgtgccccgctaccagaagttccccctgggagatggctcatccctgctgctggccgacactctgcagacgcactccagcctctttctggaggagctggagatgctggtgccctcaacacccacctctactagcggtgccttctggaagggcagtgagttggccactgaccccccggcccagccagccgcccccagcaccaccagtgaggtggttaagatcctggagcgctggtgggggaccaagcggatcgactactcgctgtactgccccgaggcgctcaccgcctttcccaccgtcacgctgccccacctcttccacgccagctactgggagtccgccgacgtggtggcgttcatcctgcgccaggtgatcgagaaggagcggccacagctggcggaatgcgaggagccgtccatctacagcccggccttccccagggagaagtggcagcgaaaacgcacgcaggtcaagatccggaacgtcacttccaaccaccgggcgagcgacacggtggtgtgcgagggccgcccccaggtgctaagcgggcgcttcatgtacgggcccctggacgtcgtcacgctcactggagagaaggtggatgtctacatcatgacgcagccgctgtcgggcaagtggatccactttggcaccgaagtcaccaatagctcgggccgcctcaccttcccagttcccccagaacgcgcgctgggcattggtgtctaccccgtgcgcatggtggtcaggggcgaccacacctatgccgaatgctgcctgactgtggtggcccgcggcacggaggctgtggtcttcagcatcgacggctccttcaccgccagcgtctccatcatgggcagcgaccccaaggtgcgagctggcgccgtggacgtggtcaggcactggcaggactccggctacctgatcgtgtatgtcacaggccggccggatatgcagaagcaccgcgtggtggcatggctgtcgcagcacaacttcccccacggcgtcgtctccttctgcgacggcctcacccacgacccactacgccagaaggcaatgtttctgcagagcctggtgcaggaggtagaactgaacatcgtggccggttatgggtctcccaaagatgtggctgtatacgcggcgctggggctgtccccgagccagacctacatcgtgggccgtgccgtgcggaagctacaggcgcagtgccagttcctgtcagacggctatgtggcccacctgggccagctggaagcgggctcgcactcgcatgcctcctcgggacccccgagagctgccttgggcaagagcagctatggtgtggctgcccccgtggacttcctgcgcaaacagagccagctgcttcgctcgaggggccccagccaggcggagcgtgagggcccgggaacaccacccaccaccctggcacggggcaaagcacggagcatcagcctgaagctggacagcgaggagtgaggcccacaccagcctggacctgggttatttattgacacacccaaggggcccgaggggctgcgtgtgggaggctggggacccagacttttggccccagcgctggcccccccagccccacaccctatatctccgtgtgctcctcggtgttacttccctttcatatgaggggacccagcgccggggggagggaggagggcgtgggcatgggcgcagaggcttttccagtgtgtataaatccatgaaaataaacgccacctgcaccccaaaaaaaaaaaaaaaaaaaaaaa

SEQ ID NO: 196 - DNA, 1817 bp, Homo sapiens
  ref <308>: DATABASE ACCESSION NUMBER: NCBI / NM_004517
  ref <309>: DATABASE ENTRY DATE: 2011-12-17
  ref <313>: RELEVANT RESIDUES IN SEQ ID NO: (1)..(1817)
agcgccacgggcggggcggggccggcggcgggctgcgggcgcggccggacgggagttccccggagaaggatcctgcagcccgagtcccgaggataaagcttggggttcatcctccttccctggatcactccacagtcctcaggcttccccaatccaggggactcggcgccgggacgctgctatggacgacattttcactcagtgccgggagggcaacgcagtcgccgttcgcctgtggctggacaacacggagaacgacctcaaccagggggacgatcatggcttctcccccttgcactgggcctgccgagagggccgctctgctgtggttgagatgttgatcatgcggggggcacggatcaatgtaatgaaccgtggggatgacacccccctgcatctggcagccagtcatggacaccgtgatattgtacagaagctattgcagtacaaggcagacatcaatgcagtgaatgaacacgggaatgtgcccctgcactatgcctgtttttggggccaagatcaagtggcagaggacctggtggcaaatggggcccttgtcagcatctgtaacaagtatggagagatgcctgtggacaaagccaaggcacccctgagagagcttctccgagagcgggcagagaagatgggccagaatctcaaccgtattccatacaaggacacattctggaaggggaccacccgcactcggccccgaaatggaaccctgaacaaacactctggcattgacttcaaacagcttaacttcctgacgaagctcaacgagaatcactctggagagctatggaagggccgctggcagggcaatgacattgtcgtgaaggtgctgaaggttcgagactggagtacaaggaagagcagggacttcaatgaagagtgtccccggctcaggattttctcgcatccaaatgtgctcccagtgctaggtgcctgccagtctccacctgctcctcatcctactctcatcacacactggatgccgtatggatccctctacaatgtactacatgaaggcaccaatttcgtcgtggaccagagccaggctgtgaagtttgctttggacatggcaaggggcatggccttcctacacacactagagcccctcatcccacgacatgcactcaatagccgtagtgtaatgattgatgaggacatgactgcccgaattagcatggctgatgtcaagttctctttccaatgtcctggtcgcatgtatgcacctgcctgggtagcccccgaagctctgcagaagaagcctgaagacacaaacagacgctcagcagacatgtggagttttgcagtgcttctgtgggaactggtgacacgggaggtaccctttgctgacctctccaatatggagattggaatgaaggtggcattggaaggccttcggcctaccatcccaccaggtatttcccctcatgtgtgtaagctcatgaagatctgcatgaatgaagaccctgcaaagcgacccaaatttgacatgattgtgcctatccttgagaagatgcaggacaagtaggactggaaggtccttgcctgaactccagaggtgtcgggacatggttgggggaatgcacctccccaaagcagcaggcctctggttgcctcccccgcctccagtcatggtactaccccagccatggggtccatccccttcccccatccctaccactgtggccccaagaggggcgggctcagagctttgtcacttgccacatggtgtctcccaacatgggagggatcagccccgcctgtcacaataaagtttattatgaaaaaaaaaaaaaaaaaaaaaa

SEQ ID NO: 197 - DNA, 2397 bp, Homo sapiens
  ref <308>: DATABASE ACCESSION NUMBER: NCBI / NM_004494
  ref <309>: DATABASE ENTRY DATE: 2011-12-18
  ref <313>: RELEVANT RESIDUES IN SEQ ID NO: (1)..(2397)
gagggaggaggaggagtggggaccgggcggggggtggaggaagaggcctcgcgcagaggagggagcaattgaatttcaaacacaaacaactgcacgagcgcgcacccaccgcgccggagccttgccccgatccgcgcccgccccgtccgtgcggcgcgcgggcggagacgccgtggccgcgccggagctcgggccgggggccaccatcgaggcgggggccgcgcgagggccggagcggagcggcgccgccaccgccgcacgcgcaaacttgggctcgcgcttcccggcccggcgcggagcccggggcgcccggagccccgccatgtcgcgatccaaccggcagaaggagtacaaatgcggggacctggtgttcgccaagatgaagggctacccacactggccggcccggattgacgagatgcctgaggctgccgtgaaatcaacagccaacaaataccaagtcttttttttcgggacccacgagacggcattcctgggccccaaagacctcttcccttacgaggaatccaaggagaagtttggcaagcccaacaagaggaaagggttcagcgaggggctgtgggagatcgagaacaaccctactgtcaaggcttccggctatcagtcctcccagaaaaagagctgtgtggaagagcctgaaccagagcccgaagctgcagagggtgacggtgataagaaggggaatgcagagggcagcagcgacgaggaagggaagctggtcattgatgagccagccaaggagaagaacgagaaaggagcgttgaagaggagagcaggggacttgctggaggactctcctaaacgtcccaaggaggcagaaaaccctgaaggagaggagaaggaggcagccaccttggaggttgagaggccccttcctatggaggtggaaaagaatagcaccccctctgagcccggctctggccgggggcctccccaagaggaagaagaagaggaggatgaagaggaagaggctaccaaggaagatgctgaggccccaggcatcagagatcatgagagcctgtagccaccaatgtttcaagaggagcccccaccctgttcctgctgctgtctgggtgctactggggaaactggccatggcctgcaaactgggaacccctttcccaccccaacctgctctcctcttctactcacttttcccactccaagcccagcccatggagattgacctggatggggcaggccacctggctctcacctctaggtccccatactcctatgatctgagtcagagccatgtcttctccctggaatgagttgaggccactgtgttccttccgcttggagctattttccaggcttctgctggggcctgggacaactgctcccacctcctgacacccttctcccactctcctaggcattctggacctctgggttgggatcaggggtaggaatggaaaggatggagcatcaacagcagggtgggcttgtggggcctgggaggggcaatcctcaaatgcggggtgggggcagcacaggagggcggcctccttctgagctcctgtcccctgctacacctattatcccagctgcctagattcagggaaagtgggacagcttgtaggggaggggctcctttccataaatccttgatgattgacaacacccatttttccttttgccgaccccaagagttttgggagttgtagttaatcatcaagagaatttggggcttccaagttgttcgggccaaggacctgagacctgaagggttgactttacccatttgggtgggagtgttgagcatctgtccccctttagatctctgaagccacaaataggatgcttgggaagactcctagctgtcctttttcctctccacacagtgctcaaggccagcttatagtcatatatatcacccagacataaaggaaaagacacattttttaggaaatgtttttaataaaagaaaattacaaaaaaaaattttaaagacccctaaccctttgtgtgctctccattctgctccttccccatcgttgcccccatttctgaggtgcactgggaggctccccttctatttggggcttgatgactttctttttgtagctggggctttgatgttccttccagtgtcatttctcatccacataccctgacctggccccctcagtgttgtcaccagatctgatttgtaacccactgagaggacagagagaaataagtgccctctcccaccctcttcctactggtctctctatgcctctctacagtctcgtctcttttaccctggcccctctcccttgggctctgatgaaaaattgctgactgtagctttggaagtttagctctgagaaccgtagatgatttcagttctaggaaaataaaacccgttgattactataaaaaaaaaaa

SEQ ID NO: 198 - DNA, 2497 bp, Homo sapiens
  ref <308>: DATABASE ACCESSION NUMBER: NCBI / NM_004121
  ref <309>: DATABASE ENTRY DATE: 2011-11-26
  ref <313>: RELEVANT RESIDUES IN SEQ ID NO: (1)..(2497)
tgcctggcctcctgccagcaacaagcaggagctgaaaaccagaagttgaggcgtgagtttggccactccgtagtgtgcacttggtgagggcagcagctcgccacagctgccagccatctgtccattcacccatctgtccatctggcagcccgctgttcagacctgtctgtctgtccgcccatctgtaagcccatctctgtcccattgtctatctgaccatctttctcttactgtcctctttgtctagctatctggcctatctgtcgatccatcttcgtgtctgtcttcagcccccacctgtttgtccatctgtccaattacctgtgactctgtgcatcttcttgtccattcatctgcccacccatccgtccctccgtctgcccaccagccgcccctctcctcctgggctgcagagccatggcccggggctacggggccacggtcagcctagtcctgctgggtctggggctggcgctggctgtcattgtgctggctgtggtcctctctcgacaccaggccccatgtggcccccaggcctttgcccacgctgctgttgccgccgactccaaggtctgctcggatattggacgagccatcctccagcagcagggctcacccgtggatgccaccatcgcggctctggtctgcaccagcgtcgtcaaccctcagagcatgggcctgggcggaggggtcatcttcaccatctacaatgtgacaacagggaaggtggaggtcatcaatgcccgggagacggtgccggccagccacgccccgagcctgctggaccagtgtgcacaggctctgccactgggcacaggggcccagtggatcggggtgcccggggagctccgtggctatgccgaggcccaccgccgccatggccgcctgccctgggcgcagctgttccagcccaccatcgcgctgctccgaggggggcatgtggtggcccctgtcctcagccgtttcctgcacaacagcatcctgcggccttccttgcaggcgtcaaccctgcgccagctcttcttcaacgggacagaacccctgaggcctcaggacccactcccatggcctgcactggccaccaccctggagaccgtggccacagagggcgtggaggtcttctacacggggaggctgggccagatgctggtggaggacattgccaaggaagggagccagctgacgctgcaggacctggccaagttccagcccgaggtggtggatgccctggaggtgcccctgggggactataccctgtactcaccaccgccgcctgcagggggtgccattctcagctttatcctcaacgtgctaagagggttcaacttctcaacagagtctatggccaggcctgaagggagggtgaacgtgtaccaccaccttgtagagacgctcaagtttgccaaggggcagaggtggaggctgggggaccctcgaagccacccgaagctccagaatgcctcccgggacctgctgggggagaccctggcccagctcatccgccaacagatcgatggccggggggaccaccagctcagccactacagcttggccgaggcctggggccacgggacaggcacgtcccatgtgtctgtgctgggggaggatggcagcgccgtggctgccaccagcaccatcaacacaccctttggagcgatggtgtattcaccacggacaggcatcatcctcaacaacgagctcctggacttatgcgagcgatgcccccggggttccggcaccaccccctcacctgtgagtggagacagggtgggtggagctcccggaaggtgctggcccccagttccaggcgagcgttccccatcctccatggtgccctccatcttgatcaacaaagcccaggggtcgaagctagtgattggcggggctggcggggagctcatcatctctgctgtggcccaggccatcatgagcaagctgtggcttggctttgacctgagagcggccattgcagcccccatcctgcatgtcaacagcaagggctgtgtggagtacgagcccaacttcagccaggaggtgcagaggggactccaagaccgtggccagaaccagacccagaggcccttcttcctgaacgtggtccaggctgtgtcccaggagggggcctgtgtgtacgccgtctcggacctgaggaagagtggggaggccgcaggctactaagacactgctctgcccagagctgaagtctggccccaccatgagtcctgtgtccaggccggacatggctgggggaccaactactctggcaggatctggacccctggcaggggagtccagctgagagtggaagaggtggcggggaccagctgggcagatgagaggctgagcctcatccctaaccccctttcccagagcccctggtggtcctgaaccggcccctctatccctccgcaggcctcttgcctggggccactctcccaccctctcgatctgtatatcctccagtccaagattaaagaggcggactgtggcctgaaaa

SEQ ID NO: 199 - DNA, 3311 bp, Homo sapiens
  ref <308>: DATABASE ACCESSION NUMBER: NCBI / NM_004404
  ref <309>: DATABASE ENTRY DATE: 2011-12-17
  ref <313>: RELEVANT RESIDUES IN SEQ ID NO: (1)..(3311)
aatccgcctgcgcgctgggcggggcggggcgggctggggcgggctgtgagcggaccgcgagcgctgggcgggtccgcggcgcggtcggtcggcgcctgttctcgggctgtttggcggacgaagcttcacaaaagatgtctaagcaacagccaactcagtttataaatccagaaacacctggctatgttggatttgcaaacctccccaatcaagttcaccgaaaatcagtgaaaaaaggttttgagttcacactgatggtggtcggtgaatcaggtctaggaaaatcgactctcataaacagcctattcctaactgatctgtacccagaaagagtcatacctggagcagcagaaaaaattgaaagaactgtccagattgaggcttcaactgttgaaattgaagagcgaggggtcaagctacgcctgacagtggtagatacccctggctatggtgacgctatcaactgcagagattgttttaagacaattatctcctatattgatgagcaatttgagaggtacctgcatgacgagagcggcttgaacaggcggcacatcattgataatagggtgcattgttgcttttactttatttcaccttttggacatggacttaagcccttagatgtggcgtttatgaaggcaatacacaacaaggtgaatattgtgcctgtcattgcaaaagctgacactctcaccctgaaggaacgggagcggctgaagaaaaggattctggatgaaattgaagaacataacatcaaaatctatcacttacctgatgcagaatcagatgaagatgaagattttaaagagcagactagacttctcaaggctagcatcccattctctgtggttggatccaatcagttgattgaagccaaaggaaagaaggtcagaggccgcctctacccctggggtgttgtggaagtggagaacccagagcacaatgactttctgaagctgagaaccatgctcatcacccacatgcaggatctccaggaggtgacccaggaccttcattatgaaaacttccgttctgagagactcaagagaggcggcaggaaagtggagaatgaggacatgaataaagaccagatcttgctggaaaaagaagctgagctccgccgcatgcaagagatgattgcaaggatgcaggcgcagatgcagatgcagatgcagggcggggatggcgatggcggggctctcgggcaccacgtgtaaggtgatgtgcacatatcaagaagtcagagaaaacactttcctggataaaaaagaaaacattccagatgcatgatccagctgtgtgttttcaatccttgggagggtgccatccacattttaacagtacctgtgcctgagaatttaatttttaaaagactttgatgtgtttttgtatgaagtacttttaacgtatgtatttcattgctgtgtcacactctgtgttttgtgaggtgaatgtcttccttttctttctccctaaccactaatgttagaattgatttccaagaatcggcatgtatacttaatactgaatttctttgatttaactgacttaacaactgactaaccattgatgagcactcctgatttttatctagaacattcagatttaccataatgttccttagtggtagaggtgtgtgcctagtgatgtagaaagatacactgacttggtgcaaggccatctgcttaccacatcacaccacttggagatctttgcttccttgcttttatgtttgtacacaacacctaaaaccagttttgctgctataattctatactgttgattcgtctgcgattttatctgttaaccaaataaaacataatagaatttcctaatgagatatatctttatacttaaacagcttttttagaggtgagttttaaagaagtctcttaattctgatgctaggttgtttttaaaaccactatgcaaagaactcaccacaagccaccttttgtagtgttctccactaatactggttatcctgtgctacagagaaaatcaaagcagtcataagctccagttttcgtattgcaaataagactcttacctacaaaatgagattcagtgaactaatttggtttttactcaaccaaattaaaaatttttttaaggaaaattagcagttggtctattcagaatcaaacctttttatattttatactgcactttagtgtattttctgtcactgtaggtatagaagatctgcctcccctgtggaaattggggtctgttggtgggcgtgcccctgaagcctggcttgggttgaaaagtgttcccgccctaaggccttggtgccctgaacctctgatgcctaccgggttctcctgatttgagtttcctttaaatactccctttttgagtaattttctgatgggaggaaagtagcagtcatcatctttttgtgtgcaggctgtctcatttatttttagccattgtcgtttcattcattttgtgtaatataaaccgtgtgtcatgtcaaagtgaaagacatttcaaatctgtagcataggctagtgggcaggtccgcacagtcgaagccacacctggtctgttttctgtgcactgtagccttagtgtcacctttcttcttgtgtctccttatggtacactccagcggttgccttttttatcatttctactgaagttgggaaattcaaccccagaaattgacagatgaaaggagacaatggttgtgtagggagatggagaaaatgcttaatctgaggatgagacagggttttttcatttttgtgggggctagaaaaaacataaaatgaggcagttaaataataatagttaatgaaggtgtgctacagaaaataatctggtgttcttgctaactttgcccttcactgttgcttaattgtgaacagccaaaagctatatgttatggcttattgtgtgaaggtaactaagaagtggtgttccatgacttcagagtacatccatgcggagtccattatttgagtttgacatttaataactttgctggaaaatctgtaaaaaagaaaaacaagtttgctagtgactaagccccgcatatgtgagtgaaagtacttcaggcacgctgcctcctggtaacagctatgcagggagggaggacccacactgctacacttctgatcccctttggttttactacccaaatctaaatagatacttttgataatagataactgctcttttactaagacatagtctctacctatagaaatgtattttgaaaacacttattttacacagcaattttgtatccatttaaactaaccttttatcaataaagcactattgtttagatattaaaa

SEQ ID NO: 200 - DNA, 2385 bp, Homo sapiens
  ref <308>: DATABASE ACCESSION NUMBER: NCBI / NM_004394
  ref <309>: DATABASE ENTRY DATE: 2011-12-18
  ref <313>: RELEVANT RESIDUES IN SEQ ID NO: (1)..(2385)
ctcggctgcgccacgtcggcgcgcggcggccgcgcccccttaacggcagtggcactcacccggctcgcgcggccccggcgccccacgcgcgcgcgtcgttctcccgcccgctcgctccccggcgctcacacctgagctcactcgcgcacgcccgcccggcccgagaaccgcgccgccgcctcggccccgcggaagccccgccgcgtcatgtcttcgcctcccgaagggaaactagagactaaagctggacacccgcccgccgtgaaagctggtggaatgcgaattgtgcagaaacacccacatacaggagacaccaaagaagagaaagacaaggatgaccaggaatgggaaagccccagtccacctaaacccactgtgttcatctctggggtcatcgcccggggtgacaaagatttccccccggcggctgcgcaggtggctcaccagaagccgcatgcctccatggacaagcatccttccccaagaacccagcacatccagcagccacgcaagtgagcctggagtccaccagcctgccccatggccccggctctgctgcacttggtatttccctgacagagagaaccagcagtttcgcccaaatcctactctgctgggaaatctaaggcaaaaccaagtgctctgtcctttgccttacatttccatatttaaaactagaaacagctccagcccaaaccttgtttatggggagtctggttggatgtcatttgaggatcattgtgcccctagaggtgccattagcagaatttgccaagatccgagaaaaattttagctttagttctatttcagcagtcacctgacgtccttgtctatggtcttaaaaacaagaaggcacacatttgagaagatgagattaaggttaggagaaaacctcagtcattgcatgctttttagtatgggccaataaaatctcaacacctgtgggagagtaagaactaagggaatgagtttgggcggcccctcataaaggaccttagaggcagggaacagcaatgccaaatttccctctctcgtgagatgggggatcctgtgcaggctgatgaggcacccatgagaaaagccgaaaaagcatgcatcttagaaatagcccctcaattccaggagtcaacatgccaaagaatgaggctggagacaggtagctccgagggaggacttctggcatgagatctcggcacggcaagcccagcatcgcctcagcccagacaggctccaccaggagatcaagcaagggctgcctttcaggagtcacctcctgagccacttcagagttctggaagtgaccacggaccagggtggaggaatagacttctagttcattctgggacacttgagccagagagttgaaagcttggaaagaccagataagaaacctgccctttgtctccctagggacatgagacaccacattccatttgtgctagaaaaacctatccactgatgagtctaactgttccaaacgcctcccacctggtgtgcacagctgcctgggtccattgtcacttgggtgcatcaggttgtcctccgatttttagatgagtttcctgtctagagatgtcctagtctgctcactggctggtggcagtagggtaccctgcgtcctcgaaaagccagagggttcacctagtcagacgaaactccagaacagtgcttgtggagggcctgactgtcctgctcacccacagccgatctgctgcaggtcagcaactgtgtcgtgagcagctgccaaccaccagcctttctggtgctgttctccagttcacgtctgccagctggtgagggcagaggcagacctggtcagacccagcgcccctcctccctgagggagcatggcacagcctcacacttgaaagacggtgtttggtttcccatctaatcaacttaagggaagccggcatgtacccttcaaggccctgtcaccacctatttcctgatcagttggtataaactgagggtggcttttagagacccagacttggttggcagcgctgccatggaacaccccagcaagcacctcccagcctgcctttcggagcagcacccaggaggggatgccgcgctccagcaacaccaggtcaggcctgtgcagacccctgccctgccgctgcagaaatccagaagcatccttaatgcttctcagtcttcagccagagggagggctgttatttccagaggtgcgctttttatgtacttttagctagatgtggcatgcatctgtgagctttagatcattaaatccaaaatgtttgcctaaatgagtttatcagttgttaacttcaagaatattaaatgatttataataaagctcctgcatttctctccaaaaaaaaaaaaaaaaaaaaaaaaaaaaaaaaaaaaaaaaaaaa

SEQ ID NO: 201 - DNA, 2755 bp, Homo sapiens
  ref <308>: DATABASE ACCESSION NUMBER: NCBI / NM_004383
  ref <309>: DATABASE ENTRY DATE: 2011-12-18
  ref <313>: RELEVANT RESIDUES IN SEQ ID NO: (1)..(2755)
ccgggccgcgcttcctctcgccaggcctgcgagcttcctcccagcggagccctgggcgagccgaggttggccgccgccgccgccgagcccgctgccgccctcccgctcctgccccacccgcgccttgcccgggggcttctgccggggtggggtccgagccgggcgaccgcccggctgcgccgccgtcggggccgtaacccggcccgccgtccctcccgccccagccagcctctggccgccggagcccgcggggcgtggagcgcgaggagccccgcggccccgatcgagcgtccggggcggcccccggcagccagcgcgacgttccaaaatcgaacctcagtggcggcgctcggaagcggaactctgccggggccgcgccggctacattgtttcctccccccgactccctcccgcccccttcccccgcctttcttccctccgcgacccgggccgtgcgtccgtccccctgcctctgcctggcggtccctcctcccctctccttgcacccatacctctttgtaccgcaccccctggggacccctgcgcccctcccctcccccctgaccgcatggaccgtcccgcaggccgctgatgccgcccgcggcgaggtggcccggaccgcagtgccccaagagagctctaatggtaccaagtgacaggttggctttactgtgactcggggacgccagagctcctgagaagatgtcagcaatacaggccgcctggccatccggtacagaatgtattgccaagtacaacttccacggcactgccgagcaggacctgcccttctgcaaaggagacgtgctcaccattgtggccgtcaccaaggaccccaactggtacaaagccaaaaacaaggtgggccgtgagggcatcatcccagccaactacgtccagaagcgggagggcgtgaaggcgggtaccaaactcagcctcatgccttggttccacggcaagatcacacgggagcaggctgagcggcttctgtacccgccggagacaggcctgttcctggtgcgggagagcaccaactaccccggagactacacgctgtgcgtgagctgcgacggcaaggtggagcactaccgcatcatgtaccatgccagcaagctcagcatcgacgaggaggtgtactttgagaacctcatgcagctggtggagcactacacctcagacgcagatggactctgtacgcgcctcattaaaccaaaggtcatggagggcacagtggcggcccaggatgagttctaccgcagcggctgggccctgaacatgaaggagctgaagctgctgcagaccatcgggaagggggagttcggagacgtgatgctgggcgattaccgagggaacaaagtcgccgtcaagtgcattaagaacgacgccactgcccaggccttcctggctgaagcctcagtcatgacgcaactgcggcatagcaacctggtgcagctcctgggcgtgatcgtggaggagaagggcgggctctacatcgtcactgagtacatggccaaggggagccttgtggactacctgcggtctaggggtcggtcagtgctgggcggagactgtctcctcaagttctcgctagatgtctgcgaggccatggaatacctggagggcaacaatttcgtgcatcgagacctggctgcccgcaatgtgctggtgtctgaggacaacgtggccaaggtcagcgactttggtctcaccaaggaggcgtccagcacccaggacacgggcaagctgccagtcaagtggacagcccctgaggccctgagagagaagaaattctccactaagtctgacgtgtggagtttcggaatccttctctgggaaatctactcctttgggcgagtgccttatccaagaattcccctgaaggacgtcgtccctcgggtggagaagggctacaagatggatgcccccgacggctgcccgcccgcagtctatgaagtcatgaagaactgctggcacctggacgccgccatgcggccctccttcctacagctccgagagcagcttgagcacatcaaaacccacgagctgcacctgtgacggctggcctccgcctgggtcatgggcctgtggggactgaacctggaagatcatggacctggtgcccctgctcactgggcccgagcctgaactgagccccagcgggctggcgggcctttttcctgcgtcccagcctgcacccctccggccccgtctctcttggacccacctgtggggcctggggagcccactgaggggccagggaggaaggaggccacggagcgggaggcagcgccccaccacgtcgggcttccctggcctcccgccactcgccttcttagagttttattcctttccttttttgagattttttttccgtgtgtttattttttattatttttcaagataaggagaaagaaagtacccagcaaatgggcattttacaagaagtacgaatcttatttttcctgtcctgcccgtgagggtgggggggaccgggcccctctctagggacccctcgccccagcctcattccccattctgtgtcccatgtcccgtgtctcctcggtcgccccgtgtttgcgcttgaccatgttgcactgtttgcatgcgcccgaggcagacgtctgtcaggggcttggatttcgtgtgccgctgccacccgcccacccgccttgtgagatggaattgtaataaaccacgccatgaggacaccgccgcccgcctcggcgcttcctccaccgagaaaaaaaaaaaaaaa

SEQ ID NO: 202 - DNA, 521 bp, Homo sapiens
  ref <308>: DATABASE ACCESSION NUMBER: NCBI / NM_004074
  ref <309>: DATABASE ENTRY DATE: 2011-11-20
  ref <313>: RELEVANT RESIDUES IN SEQ ID NO: (1)..(521)
ggccagcgcagccattttggcttcctgaccttgggctacggctgaccgttttttgtggtgtactccgtgccatcatgtccgtcctgacgccgctgctgctgcggggcttgacaggctcggcccggcggctcccagtgccgcgcgccaagatccattcgttgccgccggaggggaagcttgggatcatggaattggccgttgggcttacctcctgcttcgtgaccttcctcctgccagcgggctggatcctgtcacacctggagacctacaggaggccagagtgaaggggtccgttctgtccctcacactgtgacctgaccagccccaccggcccatcctggtcatgttactgcatttgtggccggcctcccctggatcatgtcattcaattccagtcacctcttctgcaatcatgacctcttgatgtctccatggtgacctccttgggggtcactgaccctgcttggtggggtcccccttgtaacaataaaatctatttaaactttaaaaaaaaaaaaaaa

SEQ ID NO: 203 - DNA, 1563 bp, Homo sapiens
  ref <308>: DATABASE ACCESSION NUMBER: NCBI / NM_004039
  ref <309>: DATABASE ENTRY DATE: 2012-01-01
  ref <313>: RELEVANT RESIDUES IN SEQ ID NO: (1)..(1563)
gctcagcatttggggacgctctcagctctcggcgcacggcccagcttccttcaaaatgtctactgttcacgaaatcctgtgcaagctcagcttggagggtgatcactctacacccccaagtgcatatgggtctgtcaaagcctatactaactttgatgctgagcgggatgctttgaacattgaaacagccatcaagaccaaaggtgtggatgaggtcaccattgtcaacattttgaccaaccgcagcaatgcacagagacaggatattgccttcgcctaccagagaaggaccaaaaaggaacttgcatcagcactgaagtcagccttatctggccacctggagacggtgattttgggcctattgaagacacctgctcagtatgacgcttctgagctaaaagcttccatgaaggggctgggaaccgacgaggactctctcattgagatcatctgctccagaaccaaccaggagctgcaggaaattaacagagtctacaaggaaatgtacaagactgatctggagaaggacattatttcggacacatctggtgacttccgcaagctgatggttgccctggcaaagggtagaagagcagaggatggctctgtcattgattatgaactgattgaccaagatgctcgggatctctatgacgctggagtgaagaggaaaggaactgatgttcccaagtggatcagcatcatgaccgagcggagcgtgccccacctccagaaagtatttgataggtacaagagttacagcccttatgacatgttggaaagcatcaggaaagaggttaaaggagacctggaaaatgctttcctgaacctggttcagtgcattcagaacaagcccctgtattttgctgatcggctgtatgactccatgaagggcaaggggacgcgagataaggtcctgatcagaatcatggtctcccgcagtgaagtggacatgttgaaaattaggtctgaattcaagagaaagtacggcaagtccctgtactattatatccagcaagacactaagggcgactaccagaaagcgctgctgtacctgtgtggtggagatgactgaagcccgacacggcctgagcgtccagaaatggtgctcaccatgcttccagctaacaggtctagaaaaccagcttgcgaataacagtccccgtggccatccctgtgagggtgacgttagcattacccccaacctcattttagttgcctaagcattgcctggccttcctgtctagtctctcctgtaagccaaagaaatgaacattccaaggagttggaagtgaagtctatgatgtgaaacactttgcctcctgtgtactgtgtcataaacagatgaataaactgaatttgtactttagaaacacgtactttgtggccctgctttcaactgaattgtttgaaaattaaacgtgcttggggttcagctggtgaggctgtccctgtaggaagaaagctctgggactgagctgtacagtatggttgcccctatccaagtgtcgctatttaagttaaatttaaatgaaataaaataaaataaaatcaaaaaaaaaa

SEQ ID NO: 204 - DNA, 2674 bp, Homo sapiens
  ref <308>: DATABASE ACCESSION NUMBER: NCBI / NM_001053
  ref <309>: DATABASE ENTRY DATE: 2011-11-28
  ref <313>: RELEVANT RESIDUES IN SEQ ID NO: (1)..(2674)
atgcctgcatgtgctggttcagggactcaccaccctggcgtcctcccttcttctcttgcagagcctgacgcaccccagggctgccgccatggagcccctgttcccagcctccacgcccagctggaacgcctcctccccgggggctgcctctggaggcggtgacaacaggacgctggtggggccggcgccctcggcaggggcccgggcggtgctggtgcccgtgctgtacctgctggtgtgtgcggccgggctgggcgggaacacgctggtcatctacgtggtgctgcgcttcgccaagatgaagaccgtcaccaacatctacattctcaacctggcagtggccgacgtcctgtacatgctggggctgcctttcctggccacgcagaacgccgcgtccttctggcccttcggccccgtcctgtgccgcctggtcatgacgctggacggcgtcaaccagttcaccagtgtcttctgcctgacagtcatgagcgtggaccgctacctggcagtggtgcacccgctgagctcggcccgctggcgccgcccgcgtgtggccaagctggcgagcgccgcggcctgggtcctgtctctgtgcatgtcgctgccgctcctggtgttcgcggacgtgcaggagggcggtacctgcaacgccagctggccggagcccgtggggctgtggggcgccgtcttcatcatctacacggccgtgctgggcttcttcgcgccgctgctggtcatctgcctgtgctacctgctcatcgtggtgaaggtgagggcggcgggcgtgcgcgtgggctgcgtgcggcggcgctcggagcggaaggtgacgcgcatggtgttggtggtggtgctggtgtttgcgggatgttggctgcccttcttcaccgtcaacatcgtcaacctggccgtggcgctgccccaggagcccgcctccgccggcctctacttcttcgtggtcatcctctcctacgccaacagctgtgccaaccccgtcctctacggcttcctctctgacaacttccgccagagcttccagaaggttctgtgcctccgcaagggctctggtgccaaggacgctgacgccacggagccgcgtccagacaggatccggcagcagcaggaggccacgccacccgcgcaccgcgccgcagccaacgggcttatgcagaccagcaagctgtgagagtgcaggcggggggtgggcggccccgtgtcacccccaggagcggaggttgcactgcggtgacccccacccatgacctgccagtcaggatgctccccggcggtggtgtgaggacagagctggctgaagccaggctggggtagacacagggcagtaggttccccaccgtgaccgaccatcccctctaaccgtctgccacacagcgggggctcccgggaggtaggggaggtggccagaccggtggggggctccgccatgccgtgcaagtgctcagggccgcctcaccctccatctggccccagcccatgccggccttccctctggggagcgacttttccagaaggccggccaggcgagagggtcttcctgacggcggagctgacctgcccggcccaccagctgcatgtcagctccgagccaccgggtccccgtccaaggctgctctgctaagttaaagacacccgaaagcgcttgactcaggtccccggagtccctggccagggccccagcccctcgcttgccctgcactgtgtggactctggggatgcaggtgtaaggggagtgtggctgggcagcccctggtcagccagggtcacgcctgtcctgggggccccaccctgctgcccgacaccccccatgggaggctgcgggcggcagttgctgtctcagagaggggagtgtgggggcttgggcgctggcctagccaggggcgaggtggggaggcggctggtgcagaggagagctgggggctgaggttggggtgaaggctgcagccctccaggctgctgggggtgcagatggctgtgccgtgctgagattggctctgtctggaggggtccagtgtggggtgcctgagggcactagggagaggtgctcctgctgcaggaggacctgagggtcagggcttggagaggacagggaacctgcggccgtctcttctgctttggggcaggggctctggcccgggagagggaacggggacaggagcagaggacggtcatccaggcgcagcggggagctgctccccaggccacagcagacagcactgctgagaggcagcggccgcgcgggtgacgcaaatggcaggccctgggaatcccgccgcctcccacctagaattgtcctacctcccccaccccaaacaccagcttttcctggcgccccaggcccagaacgtgggcccagagagccttgctggggtctctggggcaccttggccttgctctgaggctggaaggagaaggaccagggtgcggcatcactcggcctcagggacccctctgccctgcccagcactggccccgacccgtgctcccgccgtctgcccagagcaggacctcaacctcctggagggcacagggagcggctgagtgggcacaaatcctggcaggagaaaggcccaggctgaggccaggcctgggaaacatccaagcagtgaggacacgcgtgtttgacaactgctcccctgaataaatgcgaggataaatgttt

SEQ ID NO: 205 - DNA, 2288 bp, Homo sapiens
  ref <308>: DATABASE ACCESSION NUMBER: NCBI / NM_001328
  ref <309>: DATABASE ENTRY DATE: 2011-12-18
  ref <313>: RELEVANT RESIDUES IN SEQ ID NO: (1)..(2288)
tcgtcggagcgcggctcagcggcgcggcggagactcggcacggcggcggccaggcgcaggcgggcgggcggagcagcggacggcgccgaggccgccccacgcgccgggctcgcggcggcgcagcgcgccggagtggtcggggcccgcggccgctcgcgcctctcgatgggcagctcgcacttgctcaacaagggcctgccgcttggcgtccgacctccgatcatgaacgggcccctgcacccgcggcccctggtggcattgctggatggccgggactgcacagtggagatgcccatcctgaaggacgtggccactgtggccttctgcgacgcgcagtccacgcaggagatccatgagaaggtcctgaacgaggctgtgggggccctgatgtaccacaccatcactctcaccagggaggacctggagaagttcaaagccctccgcatcatcgtccggattggcagtggttttgacaacatcgacatcaagtcggccggggatttaggcattgccgtctgcaacgtgcccgcggcgtctgtggaggagacggccgactcgacgctgtgccacatcctgaacctgtaccggcgggccacctggctgcaccaggcgctgcgggagggcacacgagtccagagcgtcgagcagatccgcgaggtggcgtccggcgctgccaggatccgcggggagaccttgggcatcatcggacttggtcgcgtggggcaggcagtggcgctgcgggccaaggccttcggcttcaacgtgctcttctacgacccttacttgtcggatggcgtggagcgggcgctggggctgcagcgtgtcagcaccctgcaggacctgctcttccacagcgactgcgtgaccctgcactgcggcctcaacgagcacaaccaccacctcatcaacgacttcaccgtcaagcagatgagacaaggggccttcctggtgaacacagcccggggtggcctggtggatgagaaggcgctggcccaggccctgaaggagggccggatccgcggcgcggccctggatgtgcacgagtcggaacccttcagctttagccagggccctctgaaggatgcacccaacctcatctgcaccccccatgctgcatggtacagcgagcaggcatccatcgagatgcgagaggaggcggcacgggagatccgcagagccatcacaggccggatcccagacagcctgaagaactgtgtcaacaaggaccatctgacagccgccacccactgggccagcatggaccccgccgtcgtgcaccctgagctcaatggggctgcctataggtaccctccgggcgtggtgggcgtggcccccactggcatcccagctgctgtggaaggtatcgtccccagcgccatgtccctgtcccacggcctgccccctgtggcccacccgccccacgccccttctcctggccaaaccgtcaagcccgaggcggatagagaccacgccagtgaccagttgtagcccgggaggagctctccagcctcggcgcctgggcagagggcccggaaaccctcggaccagagtgtgtggaggaggcatctgtgtggtggccctggcactgcagagactggtccgggctgtcaggaggcgggagggggcagcgctgggcctcgtgtcgcttgtcgtcgtccgtcctgtgggcgctctgccctgtgtccttcgcgttcctcgttaagcagaagaagtcagtagttattctcccatgaacgttcttgtctgtgtacagtttttagaacattacaaaggatctgtttgcttagctgtcaacaaaaagaaaacctgaaggagcatttggaagtcaatttgaggtttttttttttgttttttttttttttgtatgttggaacgtgccccagaatgaggcagttggcaaacttctcaggacaatgaatccttcccgtttttctttttatgccacacagtgcattgttttttctacctgcttgtcttatttttagaataatttagaaaaacaaaacaaaggctgtttttcctaattttggcatgaacccccccttgttccaaatgaagacggcatcacgaagcagctccaaaaggaaaagcttgggcggtgcccagcgtgcccgctgcccatcgacgtctgtcctggggacgtggagggtggcagcgtccccgcctgcaccagtgccgtcctgctgatgtggtaggctagcaatattttggttaaaatcatgtttgtgactgtaaccatttgtatgaattattttaaagaaataaaaatcctggaaagagccagcgtg

SEQ ID NO: 206 - DNA, 6511 bp, Homo sapiens
  ref <308>: DATABASE ACCESSION NUMBER: NCBI / NM_001273
  ref <309>: DATABASE ENTRY DATE: 2011-11-20
  ref <313>: RELEVANT RESIDUES IN SEQ ID NO: (1)..(6511)
attttccccccttcggccgcggcgaggaggagccggagcgggagtgacaccgagccggacccagcgcgacctgcggcggctccgggtgactcgggccagtgtagaggtcctcaggccgccggcaggagcagctgggccaattccctggccgggagcggaaggggatggcgtcgggcctgggctccccgtccccctgctcggcgggcagtgaggaggaggatatggatgcacttttgaacaacagcctgcccccaccccacccagaaaatgaagaggacccagaagaggatttgtcagaaacagagactccaaagctcaagaagaagaaaaagcctaagaaacctcgggaccctaaaatccctaagagcaagcgccaaaaaaaggagcgtatgctcttatgccggcagctgggggacagctctggggaggggccagagtttgtggaggaggaggaagaggtggctctgcgctcagacagtgagggcagcgactatactcctggcaagaagaagaagaagaagcttggacctaagaaagagaagaagagcaaatccaagcggaaggaggaggaggaggaggaggatgatgatgatgattcaaaggagcctaaatcatctgctcagctcctggaagactggggcatggaagacattgaccacgtgttctcagaggaggattatcgaaccctcaccaactacaaggccttcagccagtttgtcagacccctcattgctgccaaaaatcccaagattgctgtctccaagatgatgatggttttgggtgcaaaatggcgggagttcagtaccaataaccccttcaaaggcagttctggggcatcagtggcagctgcggcagcagcagcggtagctgtggtggagagcatggtgacagccactgaggttgcaccaccacctccccctgtggaggtgcctatccgcaaggccaagaccaaggagggcaaaggtcccaatgctcggaggaagcccaagggcagccctcgtgtacctgatgccaagaagcctaaacccaagaaagtagctcccctgaaaatcaagctgggaggttttggttccaagcgtaagagatcctcgagtgaggatgatgacttagatgtggaatctgacttcgatgatgccagtatcaatagctattctgtttctgatggttccaccagccgtagtagccgcagccgcaagaaactccgaaccactaaaaagaaaaagaaaggcgaggaggaggtgactgctgtggatggttatgagacagaccaccaggactattgcgaggtgtgccagcaaggcggtgagatcatcctgtgtgatacctgtccccgtgcttaccacatggtctgcctggatcccgacatggagaaggctcccgagggcaagtggagctgcccacactgcgagaaggaaggcatccagtgggaagctaaagaggacaattcggagggtgaggagatcctggaagaggttgggggagacctcgaagaggaggatgaccaccatatggaattctgtcgggtctgcaaggatggtggggaactgctctgctgtgatacctgtccttcttcctaccacatccactgcctgaatcccccacttccagagatccccaacggtgaatggctctgtccccgttgtacgtgtccagctctgaagggcaaagtgcagaagatcctaatctggaagtggggtcagccaccatctcccacaccagtgcctcggcctccagatgctgatcccaacacgccctccccaaagcccttggaggggcggccagagcggcagttctttgtgaaatggcaaggcatgtcttactggcactgctcctgggtttctgaactgcagctggagctgcactgtcaggtgatgttccgaaactatcagcggaagaatgatatggatgagccaccttctggggactttggtggtgatgaagagaaaagccgaaagcgaaagaacaaggaccctaaatttgcagagatggaggaacgcttctatcgctatgggataaaacccgagtggatgatgatccaccgaatcctcaaccacagtgtggacaagaagggccacgtccactacttgatcaagtggcgggacttaccttacgatcaggcttcttgggagagtgaggatgtggagatccaggattacgacctgttcaagcagagctattggaatcacagggagttaatgaggggtgaggaaggccgaccaggcaagaagctcaagaaggtgaagcttcggaagttggagaggcctccagaaacgccaacagttgatccaacagtgaagtatgagcgacagccagagtacctggatgctacaggtggaaccctgcacccctatcaaatggagggcctgaattggttgcgcttctcctgggctcagggcactgacaccatcttggctgatgagatgggccttgggaaaactgtacagacagcagtcttcctgtattccctttacaaggagggtcattccaaaggccccttcctagtgagcgcccctctttctaccatcatcaactgggagcgggagtttgaaatgtgggctccagacatgtatgtcgtaacctatgtgggtgacaaggacagccgtgccatcatccgagagaatgagttctcctttgaagacaatgccattcgtggtggcaagaaggcctcccgcatgaagaaagaggcatctgtgaaattccatgtgctgctgacatcctatgaattgatcaccattgacatggctattttgggctctattgattgggcctgcctcatcgtggatgaagcccatcggctgaagaacaatcagtctaagttcttccgggtattgaatggttactcactccagcacaagctgttgctgactgggacaccattacaaaacaatctggaagagttgtttcatctgctcaactttctcacccccgagaggttccacaatttggaaggttttttggaggagtttgctgacattgccaaggaggaccagataaaaaaactgcatgacatgctggggccgcacatgttgcggcggctcaaagccgatgtgttcaagaacatgccctccaagacagaactaattgtgcgtgtggagctgagccctatgcagaagaaatactacaagtacatcctcactcgaaattttgaagcactcaatgcccgaggtggtggcaaccaggtgtctctgctgaatgtggtgatggatcttaagaagtgctgcaaccatccatacctcttccctgtggctgcaatggaagctcctaagatgcctaatggcatgtatgatggcagtgccctaatcagagcatctgggaaattattgctgctgcagaaaatgctcaagaaccttaaggagggtgggcatcgtgtactcatcttttcccagatgaccaagatgctagacctgctagaggatttcttggaacatgaaggttataaatacgaacgcatcgatggtggaatcactgggaacatgcggcaagaggccattgaccgcttcaatgcaccgggtgctcagcagttctgcttcttgctttccactcgagctgggggccttggaatcaatctggccactgctgacacagttattatctatgactctgactggaacccccataatgacattcaggcctttagcagagctcaccggattgggcaaaataaaaaggtaatgatctaccggtttgtgacccgtgcgtcagtggaggagcgcatcacgcaggtggcaaagaagaaaatgatgctgacgcatctagtggtgcggcctgggctgggctccaagactggatctatgtccaaacaggagcttgatgatatcctcaaatttggcactgaggaactattcaaggatgaagccactgatggaggaggagacaacaaagagggagaagatagcagtgttatccactacgatgataaggccattgaacggctgctagaccgtaaccaggatgagactgaagacacagaattgcagggcatgaatgaatatttgagctcattcaaagtggcccagtatgtggtacgggaagaagaaatgggggaggaagaggaggtagaacgggaaatcattaaacaggaagaaagtgtggatcctgactactgggagaaattgctgcggcaccattatgagcagcagcaagaagatctagcccgaaatctgggcaaaggaaaaagaatccgtaaacaggtcaactacaatgatggctcccaggaggaccgagattggcaggacgaccagtccgacaaccagtccgattactcagtggcttcagaggaaggtgatgaagactttgatgaacgttcagaagctccccgtaggcccagtcgtaagggcctgcggaatgataaagataagccattgcctcctctgttggcccgtgttggtgggaatattgaagtacttggttttaatgctcgtcagcgaaaagcctttcttaatgcaattatgcgatatggtatgccacctcaggatgcttttactacccagtggcttgtaagagacctgcgaggcaaatcagagaaagagttcaaggcatatgtctctcttttcatgcggcatttatgtgagccgggggcagatggggctgagacctttgctgatggtgtcccccgagaaggcctgtctcgccagcatgtccttactagaattggtgttatgtctttgattcgcaagaaggttcaggagtttgaacatgttaatgggcgctggagcatgcctgaactggctgaggtggaggaaaacaagaagatgtcccagccagggtcaccctccccaaaaactcctacaccctccactccaggggacacgcagcccaacactcctgcacctgtcccacctgctgaagatgggataaaaatagaggaaaatagcctcaaagaagaagagagcatagaaggagaaaaggaggttaaatctacagcccctgagactgccattgagtgtacacaggcccctgcccctgcctcagaggatgaaaaggtcgttgttgaaccccctgagggagaggagaaagtggaaaaggcagaggtgaaggagagaacagaggaacctatggagacagagcccaaaggtgctgctgatgtagagaaggtggaggaaaagtcagcaatagatctgacccctattgtggtagaagacaaagaagagaagaaagaagaagaagagaaaaaagaggtgatgcttcagaatggagagacccccaaggacctgaatgatgagaaacagaagaaaaatattaaacaacgtttcatgtttaacattgcagatggtggttttactgagttgcactccctttggcagaatgaagagcgggcagccacagttaccaagaagacttatgagatctggcatcgacggcatgactactggctgctagccggcattataaaccatggctatgcccggtggcaagacatccagaatgacccacgctatgccatcctcaatgagcctttcaagggtgaaatgaaccgtggcaatttcttagagatcaagaataaatttctagctcgaaggtttaagctcttagaacaagctctggtgattgaggaacagctgcgccgggctgcttacttgaacatgtcagaagacccttctcacccttccatggccctcaacacccgctttgctgaggtggagtgtttggcggaaagtcatcagcacctgtccaaggagtcaatggcaggaaacaagccagccaatgcagtcctgcacaaagttctgaaacagctggaagaactgctgagtgacatgaaagctgatgtgactcgactcccagctaccattgcccgaattcccccagttgctgtgaggttacagatgtcagagcgtaacattctcagccgcctggcaaaccgggcacccgaacctaccccacagcaggtagcccagcagcagtgaagatgcagactgataccacctccaccgctgagcagtgaccttcctcactttctcttgtcccagcttctcccctgggggcctgagagaccctcaccttccttctgcccatcttccatgttgtaaaggaacagccccagtgcactgggggaggggagggagtgaggggcagtggtgcccttcctgcagaagagacatgcagcagtagcgctggcgccatctgcaggagctggcgggctggccttctggaccctggcttctccccactgtaacgcctgttacacacaaactgttgtgggttcctgccaggcttgaagaaaatgatctgaattttttcctccttttggttttattttgttggtttattttgtgttttcttttctcctttttggggggtattcagagtgggctgggcccctgggcgagacacagctacctctgttggcatctttttaataccaggaacccagcggctctagccactgagcggctaaatgaaataaagtggaaaaaaaaaaaaaggaaaaaaccaaaagcataaaaaaccacagcaaatttcttgatgaaaattgaaaataaaagtttccttgtattttaaaaaaaaaaaaaaa

SEQ ID NO: 207 - DNA, 5403 bp, Homo sapiens
  ref <308>: DATABASE ACCESSION NUMBER: NCBI / NM_003430
  ref <309>: DATABASE ENTRY DATE: 2011-08-13
  ref <313>: RELEVANT RESIDUES IN SEQ ID NO: (1)..(5403)
ctcgctgccgccggagtttccaggtctcgacttcactgctctgtgtcctctgctccaggaggcccagcctgtgtggccctgtgacctgcaggtattggagagccacagctaagatgccaggaacccctggaagcctagaaatgggactgttgacatttagggatgtggccatagaattctctccggaggagtggcaatgtctggacactgcacagcagaatttatataggaatgtgatgttagagaactacagaaacctggccttcctgggtattgctctctctaagccagacctgattacttatctggagcaaggaaaagagccctggaatatgaagcaacatgagatggtggatgaacccacaggtatatgtcctcattttcctcaagacttttggccagagcagagcatggaagattcttttcaaaaagtattactgagaaaatatgaaaaatgtggacatgagaatttacagttaagaaaaggttgtaaaagtgtggatgagtgtaaggtgcacaaagaaggttataataaacttaaccagtgtctcacaactgcccagagcaaagtatttcaatgtgggaaatatttgaaagtcttctataaatttttaaattcaaacagacatacgataagacatactggaaagaaatgcttcaaatgtaaaaaatgtgtcaagtcattttgcatccgtttacacaaaacccaacataaatgcgtttatattacagagaagtcctgtaaatgtaaagaatgtgaaaaaacctttcattggtcctcaacccttactaatcataaggaaattcatactgaagataaaccctacaaatgtgaagaatgtggcaaagcttttaagcagctctcaacccttactacacataaaataatctgtgctaaagagaaaatctacaagtgtgaagaatgtggcaaagcatttctatggtcctcaaccctaactagacataagaggatacacactggagagaaaccctacaaatgtgaagaatgtggcaaagcttttagccattcttcaacccttgctaaacataagagaattcatactggagagaaaccctacaaatgtgaagaatgtggcaaagcttttagccgttcttcaacccttgctaaacataagagaattcatactggagagaaaccctacaaatgtaaagaatgtggcaaagcttttagcaattcctcaacccttgctaatcataagataactcatactgaagagaaaccctacaaatgtaaagaatgtgacaaagcttttaagcgactctcaacccttactaaacataaaataatacatgctggagagaaactctacaaatgtgaagaatgtggcaaagcttttaatcgatcttcaaatcttactatacataagtttattcatactggagagaaaccttacaagtgtgaagaatgtggcaaagcatttaactggtcctcaagccttactaaacataaaagatttcatactagagagaaacccttcaaatgtaaagaatgtggcaaagcatttatatggtcttcaaccctaactagacataagaggatacacactggagagaagccctacaaatgtgaagaatgtggcaaagcttttaggcaatcctcaacccttactaaacataagataattcatactggagagaaaccctacaaatttgaagaatgtggcaaagcttttagacaatccttaacccttaataaacataagataattcatagtagagagaaaccctacaaatgtaaagaatgtggcaaagcttttaagcaattctcaacccttactacacataaaataattcatgctggaaagaaactctacaaatgtgaagaatgtggcaaagcttttaatcattcctcaagtctttctacacataagataattcatactggagagaagtcttacaagtgtgaagaatgtggcaaagcatttctatggtcctcaaccctaagaagacataagaggatacacactggagagaaaccctacaaatgtgaagaatgtggcaaagcttttagccattcttcagcccttgctaaacataagagaattcatactggagagaaaccctacaaatgtaaagaatgtggcaaagcttttagcaattcctcaacccttgctaatcataagataactcatactgaagagaaaccctacaaatgtaaagaatgtgacaaaacttttaagcgactctcaacccttactaaacataaaataatacatgctggagagaaactctacaaatgtgaagaatgtggcaaagcttttaatcgatcttcaaatcttactatacataagtttattcatactggagagaaaccttacaagtgtgaagaatgtggcaaagcatttaactggtcctcaagccttactaaacataaaagaattcatactagagagaaacccttcaaatgtaaagaatgtggcaaagcatttatatggtcttcaaccctaactagacataagaggatacacactggagagaagccctacaaatgtgaagaatgtggcaaagcttttagccgttcctcaacccttactaagcataagacaattcatactggagagaaaccctacaaatgtaaagaatgtggcaaagcttttaagcactcctcagcccttgctaaacataaaataatacatgctggagagaaactctacaaatgtgaggaatgtggcaaagcttttaatcaatcttcaaatcttacgacacataagataattcatactaaagagaaaccttccaagagtgaagaatgtgacaaagcatttatctggtcctcaacccttactgaacataagagaattcataccagagagaaaacctacaaatgtgaagaatgtggcaaagcatttagccagccttcacaccttactacacataagaggatgcacactggagagaaaccctacaaatgtgaagaatgtggcaaagcttttagccaatcctcaacccttactacacataagataattcatactggagagaaaccctacaaatgtgaagaatgtggcaaagcttttaggaaatcttcaactcttactgaacataagataattcatactggagagaaaccctacaaatgtgaagaatgtggcaaagcatttagccaatcctcaaccctaactagacatacgaggatgcacactggagagaaaccatacaaatgtgaagaatgtggcaaagcttttaatcgatcctcaaagcttactacacataagataattcatactggagagaaaccttacaagtgtgaagaatgtggcaaagcatttatatcatcctcaaccctaaatggacataagagaattcatactagagagaaaccctacaaatgtgaagaatgtggcaaagcatttagccaatcttcaaccctaactagacataagaggttgcacaccggagagaaaccctacaaatgtggagaatgtggcaaagcctttaaagagtcctcagctcttactaaacataagataattcacactggagagaaaccctacaaatgtgaaaaatgtggcaaagcctttaaccagtcttcaatccttactaaccataagaaaattcatactatcacacctgtaatcccactactttgggaggccgaggcgggcggatcacgaggtcaggagatggagaccatcctggctaacacagtgaaaccccttctctactaaaaaatacaaaaaattagccgggcgtggtggcgggcgcctgtagtcccagctatgcgagaggctgaggcaggagaatggcgtgaacccgggaggcggagcttgcagtgagccgagatcacgccactgcactcaagcctgggcgacagagcgagactccgtctcaaaaaaaaaaaaaagaaaattcatactagagagaaaccctacaaatataaagaatgtggcaaatcttttaaccggtcttcaacctttactaaacataaggtaattcatactggagtaaaactctacaaatgtgaagaatgtggcaaatcctttttctggtcctcagccctaaccagacataagaaaattcatactggacagcaaccctacaaacaggaaaaatttggcaaagcctttaaccagttttcacaccttactacagataagataactcatattggagagaaatcttacaagtgtgaataatgtggtaaagtctataaaaagtcctgaattcttaacagacataatattattcatactggagagaaactctacaaacctgaaagatgtgccaacgcttttgacaagtcaaacttttctaaacatcaagaaaatcatgctgctgagaaatcctagaaatgtgaagaatgtgacaaagcctctaaatgattgtcacacttgatcgtaggtaagataattcatactggagaaaactaccagtgtgaacaatgtggccaagctttgaactaatgctcacaccttaatgcataggaaagcatttatgcttgagaaaaagtgaacaaatatagacaaaaagccattaatacctgctcacatcgtactcaaattcagagcgttcatactaaataagaagtgtaattactgtcaaacgactgatcagaaaatatgtctttaaagtacagaagagtattttgaaaaagcattacaaatatgaagaggcattatttatgaccttttctatggaaaggtaaggacattaaaaatgtaagatgcatgatgaaaatttaagtagagaggatctttatggttaacttataatatcgagtgatgcatgaggtagatgttcagattaatattctgcattattatgaaagaaaaacattcttaattttagttaaagtttagtatgatttattgtatttttatgaaatatatgtagcatatttttaaattataaattgcatgtgaacttttcaaccaaacagttttaacatgttaaatactatcatgaattcaatgaagtgttattatgccagtaactttaacctattccaccttactcaagggtgtaggtaaaagatggtaaaaatacactatttggtaagataatggactgacatctctagtgattttttttgccagtgagttttaattgccattaagttaaagaatattgttcccataggctaaatttttatttttattttctcatttaaatgtatttgacttaatttttgtggatacctaatatgtgtacatattatgccatatgtggcatattttgatacggacacacaatatataacaatcgcattagactaaatgcggtctccattacctctagcatttattctttgtattacaaataattcaattctacagttttagttatttttaaatgtacaattaaattgttgttgactacaggattatttttatggtcataataaaacttatatacaaacataagtaaaatccataaaaaaaa

SEQ ID NO: 208 - DNA, 1407 bp, Homo sapiens
  ref <308>: DATABASE ACCESSION NUMBER: NCBI / NM_003314
  ref <309>: DATABASE ENTRY DATE: 2011-12-17
  ref <313>: RELEVANT RESIDUES IN SEQ ID NO: (1)..(1407)
gaccggagaagctgtgaggttctttagcgtcacctccctcactgggcagcatgggggagaagtcagagaactgtggggttccagaggatctgttaaatggtttgaaggttacagatactcaggaagccgagtgtgctggccctccagttcctgatcccaaaaatcagcattcccagagtaagctgctcagggatgatgaggcccatctccaggaggaccagggagaagaggagtgttttcatgactgcagtgcctcatttgaggaggagccaggagcggacaaggttgagaacaaatctaatgaagatgtgaattcctctgaactagatgaagaatacctaatagaactggaaaaaaacatgtcggatgaagagaaacagaaaagaagagaagagagcactagactaaaggaggagggaaatgaacagtttaagaaaggagattatatagaagctgaaagttcttatagtcgagccctcgaaatgtgcccatcctgcttccaaaaggagaggtcgattctattttcaaatagagctgcagcaaggatgaaacaggacaagaaagaaatggccatcaatgactgcagcaaagcaattcaattaaaccccagctatatcagggcaatattgaggagagcagagttgtatgagaagacggacaagctagatgaagccctggaagactataaatctatattagaaaaagatccatcaatacatcaagcaagagaagcttgtatgagattacctaagcaaattgaagaacgtaatgaaagactaaaagaagagatgttaggtaaattaaaagatcttgggaacttggttctccgaccttttgggctctccacggaaaatttccagatcaaacaggattcctctaccggctcgtactccatcaatttcgttcaaaatccaaataataacagataacaaagataacaaaagctttacaagctgacttggaattgtgtgctgcttgctgttagctaggggaaaggccctgccaatgtttaacttttaaaagcatcttatctaaaagaaaggctatccagtagagcccagtgctcccttgtccctcttttatgatcagggtgaaatgtacttcctgatgtaatgaacctaatttgatttccattttaaggtggtgtctgtgcagctggtgtccccgattctggctgtcctatgtccaggaagaagcccatttgttgaggctgaccttcctgatcatacacacacacagcccagcaaaagcctctcctgaaccaaacaaacctgttggttgggagactgcccagacatgattgatgacgggttcccgcctgctgtcccctccctgatcacacagctaacgaggctgcctccagcatttcctgatttcctctgtggtaataaaagctttctgtgctta

SEQ ID NO: 209 - DNA, 2885 bp, Homo sapiens
  ref <308>: DATABASE ACCESSION NUMBER: NCBI / NM_003217
  ref <309>: DATABASE ENTRY DATE: 2011-12-24
  ref <313>: RELEVANT RESIDUES IN SEQ ID NO: (1)..(2885)
gagaggcgaacgccgggtaaaagatcgggagcggaagtgggcgagtcagagcacatccggtgttagaagcgctggtaggccttggagaggcgggttaggaagagtggagactgctgcacggactctggaaccatgaacatatttgatcgaaagatcaactttgatgcgcttttaaaattttctcatataaccccgtcaacgcagcagcacctgaagaaggtctatgcaagttttgccctttgtatgtttgtggcggctgcaggggcctatgtccatatggtcactcatttcattcaggctggcctgctgtctgccttgggctccctgatattgatgatttggctgatggcaacacctcatagccatgaaactgaacagaaaagactgggacttcttgctggatttgcattccttacaggagttggcctgggccctgccctggagttttgtattgctgtcaaccccagcatccttcccactgctttcatgggcacggcaatgatctttacctgcttcaccctcagtgcactctatgccaggcgccgtagctacctctttctgggaggtatcttgatgtcagccctgagcttgttgcttttgtcttccctggggaatgttttctttggatccatttggcttttccaggcaaacctgtatgtgggactggtggtcatgtgtggcttcgtcctttttgatactcaactcattattgaaaaggccgaacatggagatcaagattatatctggcactgcattgatctcttcttagatttcattactgtcttcagaaaactcatgatgatcctggccatgaatgaaaaggataagaagaaagagaagaaatgaagtgaccatccagcctttcccaattagacttcctctccttccacccctcatttcctttttgcacacattacaggtggtgtgttctgtgataatgaaaagcatcagaaaagcttttgtactttgtggtttcctctattttgaattttttgatcaaaaaactgattagcagaatatagtttggagtttggcttcatcttcctggggttcccctcactcccttttttgtcaaccccatctgtagcctcttcctctactcaggcagtcgacccgccacgatgagaagtgggaccagcagagggcgccaacttcaggagtccgctttcccaccaggcttcattcacccagtggacctgaactgtttggtagagccacccggcccttccttcctcattgttgtttggtatgcgcacagttcctgtgggactgggccgtgagttttccattggaaagaagttcagtggtcccattgttaactcagcctcaaatctcaactgtcaggccctacaaagaaaatggagagcctcttctggtggatgctttgctccctctgagctgcccatgctggtctggcaaacacacctttctgctttgccttcacaaaagtaatgtgttccctttcccaccccttgcctgaccctcagggagtcagcctgcttccatccatgggtgggaagacttcagcacaaaggaaagactaattcttgtcaggcatttttgaaaaggctgattatgtgtatcaaggtacagcatcgtagggttcccctaaacttgccctgtttttgtttttttagtttgttatccccttactgagcggcctctactaggtggctgtgattaaatgtcccaagcaaggatagggaaggggaatggttgagcctctggagatcattgtaaccaatcctgccagacctgtttggggcagtggggagcaaacctagataaggacctgtttggggcagcagggagcaaaatctcctttaacaaccaagcagttcctcattcacatcaacagagcgaggctgtgataacttaggaggcagcaatcctaatagtccttcagtgcattttagtctgtctccaactggacaccagtaggtagtgtcaagccagagattcggggcagtagataaatgttcattttactgatgcactttagtttttggtctgttacctgttttccagaaatttgtggccttttaggcgggagttaggcgaccaaaccagtgagagccccaatccctgcagttttgtggcttcaagtgtgggtggacagtcctaatggggatctccagctccttcctgtgggctgccacagacagctacccccagaagggtcaatgttgggagtggttgtggctctgagctgctctacagagcttcagtgtgagaggatcgagccattgaaagctcattaccagtaggacataatttttggctctccctattcacaaccagtgcacagtttgacacagtggcctcaggttcacagtgcaccatgtcactgtgctatcctacgaaatcatttgtttctaagttgtgtttattcctggagtgacatgccaccccgaatggctcactttcactgaggatgctgtcctctgatttagctgctgcctccagcctctggcttgagaacttactaaaggcacttccttcctgttaaacccctgttaactctccataaatttggtgattctctgctaggcctaagattttgagttaacatctcttgaagccaaactccaccttctgtgctttttgcttgggataatggagtttttctttagaaacagtgccaagaatgacaagatattaaaaaaaaaaaagaaagaaaaaaaaaaaaacacctacttttaaagaaaatacctaacagatttttaatatagttatctctaccactttcttttctagtttcttgattttcagctcaggctgcattctaactcatactgtgaagacaaaggtgtttttgattcagaaatatatgaaatctgcatagtcttaatttgtaaaaaataaagaaaattccttaaccttta

SEQ ID NO: 210 - DNA, 1273 bp, Homo sapiens
  ref <308>: DATABASE ACCESSION NUMBER: NCBI / NM_003132
  ref <309>: DATABASE ENTRY DATE: 2011-11-28
  ref <313>: RELEVANT RESIDUES IN SEQ ID NO: (1)..(1273)
gcgggcggcgggcggagctggtcccgttgtgctgcggcgccgcgcggcctgcagtcccgggcccgcgccccgcgccgcccgcccgcccgccatggagcccggccccgacggccccgccgcctccggccccgccgccatccgcgagggctggttccgcgagacctgcagcctgtggcccggccaggccctgtcactgcaggtggagcagctgctccaccaccggcgctcgcgctaccaggacatcctcgtcttccgcagtaagacctatggcaacgtgctggtgttggacggtgtcatccagtgcacggagagagacgagttctcctaccaggagatgatcgccaacctgcctctctgcagccaccccaacccgcgaaaggtgctgatcatcgggggcggagatggaggtgtcctgcgggaggtggtgaagcacccctccgtggagtccgtggtccagtgtgagatcgacgaggatgtcatccaagtctccaagaagttcctgccaggcatggccattggctactctagctcgaagctgaccctacatgtgggtgacggttttgagttcatgaaacagaatcaggatgccttcgacgtgatcatcactgactcctcagaccccatgggccccgccgaaagtctcttcaaggagtcctattaccagctcatgaagacagccctcaaggaagatggtgtcctctgctgccagggcgagtgccagtggctgcacctggacctcatcaaggagatgcggcagttctgccagtccctgttccccgtggtggcctatgcctactgcaccatccccacctaccccagcggccagatcggcttcatgctgtgcagcaagaacccgagcacgaacttccaggagccggtgcagccgctgacacagcagcaggtggcgcagatgcagctgaagtactacaactccgacgtgcaccgcgccgcctttgtgctgcccgagtttgcccgcaaggccctgaatgatgtgagctgagcccaggcgccaccactgatgccacccaggacctcggaccttggagcctgcggggtgcctcggcccctccagccccgggccggacctcctgctggctctcgcccaccaaccaagtgttacaagccccagaatgctgcccggcctgccctgctgggcggactgtctgtgtgtctgtctctctggcgttccacctccaagcctataccagctgtgtacagcgccatctctctgccttctgttgcccctcactcaccaaacacgtgtatttatagc

SEQ ID NO: 211 - DNA, 2770 bp, Homo sapiens
  ref <308>: DATABASE ACCESSION NUMBER: NCBI / NM_000199
  ref <309>: DATABASE ENTRY DATE: 2011-11-10
  ref <313>: RELEVANT RESIDUES IN SEQ ID NO: (1)..(2770)
gaccggggtcggggcagggggcggggccgagcgggagaccagagagccggagccggatcccgatcccgagtccgagccgccgccgccatgagctgccccgtgcccgcctgctgcgcgctgctgctagtcctggggctctgccgggcgcgtccccggaacgcactgctgctcctcgcggatgacggaggctttgagagtggcgcgtacaacaacagcgccatcgccaccccgcacctggacgccttggcccgccgcagcctcctctttcgcaatgccttcacctcggtcagcagctgctctcccagccgcgccagcctcctcactggcctgccccagcatcagaatgggatgtacgggctgcaccaggacgtgcaccacttcaactccttcgacaaggtgcggagcctgccgctgctgctcagccaagctggtgtgcgcacaggcatcatcgggaagaagcacgtggggccggagaccgtgtacccgtttgactttgcgtacacggaggagaatggctccgtcctccaggtggggcggaacatcactagaattaagctgctcgtccggaaattcctgcagactcaggatgaccggcctttcttcctctacgtcgccttccacgacccccaccgctgtgggcactcccagccccagtacggaaccttctgtgagaagtttggcaacggagagagcggcatgggtcgtatcccagactggaccccccaggcctacgacccactggacgtgctggtgccttacttcgtccccaacaccccggcagcccgagccgacctggccgctcagtacaccaccgtcggccgcatggaccaaggagttggactggtgctccaggagctgcgtgacgccggtgtcctgaacgacacactggtgatcttcacgtccgacaacgggatccccttccccagcggcaggaccaacctgtactggccgggcactgctgaacccttactggtgtcatccccggagcacccaaaacgctggggccaagtcagcgaggcctacgtgagcctcctagacctcacgcccaccatcttggattggttctcgatcccgtaccccagctacgccatctttggctcgaagaccatccacctcactggccggtccctcctgccggcgctggaggccgagcccctctgggccaccgtctttggcagccagagccaccacgaggtcaccatgtcctaccccatgcgctccgtgcagcaccggcacttccgcctcgtgcacaacctcaacttcaagatgccctttcccatcgaccaggacttctacgtctcacccaccttccaggacctcctgaaccgcaccacagctggtcagcccacgggctggtacaaggacctccgtcattactactaccgggcgcgctgggagctctacgaccggagccgggacccccacgagacccagaacctggccaccgacccgcgctttgctcagcttctggagatgcttcgggaccagctggccaagtggcagtgggagacccacgacccctgggtgtgcgcccccgacggcgtcctggaggagaagctctctccccagtgccagcccctccacaatgagctgtgaccatcccaggaggcctgtgcacacatcccaggcatgtcccagacacatcccacacgtgtccgtgtggccggccagcctggggagtagtggcaacagcccttccgtccacactcccatccaaggagggttcttccttcctgtggggtcactcttgccattgcctggagggggaccagagcatgtgaccagagcatgtgcccagcccctccaccaccaggggcactgccgtcatggcaggggacacagttgtccttgtgtctgaaccatgtcccagcacgggaattctagacatacgtggtctgcggacagggcagcgcccccagcccatgacaagggagtcttgttttctggcttggtttggggacctgcaaatgggaggcctgaggccctcttcaggctttggcagccacagatacttctgaacccttcacagagagcaggcaggggcttcggtgccgcgtgggcagtacgcaggtcccaccgacactcacctgggagcacggcgcctggctcttaccagcgtctggcctagaggaagcctttgagcgacctttgggcaggtttctgcttcttctgttttgccccatggtcaagtccctgttccccaggcaggtttcagctgattggcagcaggctccctgagtgatgagcttgaacctgtggtgtttctgggcagaagcttatcttttttgagagtgtccgaagatgaaggcatggcgatgcccgtcctctggcttgggttaattcttcggtgacactggcattgctgggtggtgatgcccgtcctctggcttgggttaattcttcggtgacactggcgttgctgggtggcaatgcccatcctctgccttgggttaattcttcggtgacactggcgttgctgggtggcgatgcccgtcctctggcttgggttaattcttggatgacgtcggcgttgctgggagaatgtgccgttcctgccctgcctccacccacctcgggagcagaagcccggcctggacacccctcggcctggacacccctcgaaggagagggcgcttccttgagtaggtgggctccccttgcccttccctccctatcactccatactggggtgggctggaggaggccacaggccagctattgtaaaagctttttattttagtaaaatatacagaagttctttttctgaaaa

SEQ ID NO: 212 - DNA, 829 bp, Homo sapiens
  ref <308>: DATABASE ACCESSION NUMBER: NCBI / NM_002818
  ref <309>: DATABASE ENTRY DATE: 2011-11-20
  ref <313>: RELEVANT RESIDUES IN SEQ ID NO: (1)..(829)
tggggagtgaaagcgaaagcccgggcgactagccgggagaccagagatctagcgactgaagcagcatggccaagccgtgtggggtgcgcctgagcggggaagcccgcaaacaggtggaggtcttcagacagaatcttttccaggaggctgaggaattcctctacagattcttgccacagaaaatcatatacctgaatcagctcttgcaagaggactccctcaatgtggctgacttgacttccctccgggccccactggacatccccatcccagaccctccacccaaggatgatgagatggaaacagataagcaggagaagaaagaagtccataagtgtggatttctccctgggaatgagaaagtcctgtccctgcttgccctggttaagccagaagtctggactctcaaagagaaatgcattctggtgattacatggatccaacacctgatccccaagattgaagatggaaatgattttggggtagcaatccaggagaaggtgctggagagggtgaatgccgtcaagaccaaagtggaagctttccagacaaccatttccaagtacttctcagaacgtggggatgctgtggccaaggcctccaaggagactcatgtaatggattaccgggccttggtgcatgagcgagatgaggcagcctatggggagctcagggccatggtgctggacctgagggccttctatgctgagctttatcatatcatcagcagcaacctggagaaaattgtcaacccaaagggtgaagaaaagccatctatgtactgaacccgggactagaaggaaaataaatgatctatatgttgtgtgga

SEQ ID NO: 213 - DNA, 1744 bp, Homo sapiens
  ref <308>: DATABASE ACCESSION NUMBER: NCBI / NM_002733
  ref <309>: DATABASE ENTRY DATE: 2011-12-24
  ref <313>: RELEVANT RESIDUES IN SEQ ID NO: (1)..(1744)
actgccatgacgtgggcggaagtggcgtcgccgcaccggatgtggggcggggcctgccccaagagagtttcctaaagcgaggaaaccaagccgggcgcctcttgcaatggagacggtcatttcttcagatagctccccagctgtggaaaatgagcatcctcaagagaccccagaatccaacaatagcgtgtatacttccttcatgaagtctcatcgctgctatgacctgattcccacaagctccaaattggttgtatttgatacgtccctgcaggtgaagaaagctttttttgctttggtgactaacggtgtacgagctgcccctttatgggatagtaagaagcaaagttttgtgggcatgctgaccatcactgatttcatcaatatcctgcaccgctactataaatcagccttggtacagatctatgagctagaagaacacaagatagaaacttggagagaggtgtatctccaggactcctttaaaccgcttgtctgcatttctcctaatgccagcttgtttgatgctgtctcttcattaattcggaacaagatccacaggctgccagttattgacccagaatcaggcaatactttgtacatcctcacccacaagcgcattctgaagttcctcaaattgtttatcactgagttccccaagccagagttcatgtccaagtctctggaagagctacagattggcacctatgccaatattgctatggttcgcactaccacccccgtctatgtggctctggggatttttgtacagcatcgagtctcagccctgccagtggtggatgagaaggggcgtgtggtggacatctactccaagtttgatgttatcaatctggcagcagaaaagacctacaacaacctagatgtatctgtgactaaagccttgcaacatcgatcacattactttgagggtgttctcaagtgctacctgcatgagactctggagaccatcatcaacaggctagtggaagcagaggttcaccgacttgtagtggtggatgaaaatgatgtggtcaagggaattgtatcactgtctgacatcctgcaggccctggtgctcacaggtggagagaagaagccctgagctgggggaaggggtcatgcagcaccaggggatatgcccaactcactgcctgctggaagctctgtgggaatcagatgaaacttgagggaattgtgactctgttccctgttcagggtcccctgcccttctatctgggagctagggaaggtatgggggaggaaagagaatggatttatagctacccttaccctcacacatacacttgaaaaaactttcagcctagccagttctagcccctgtcctcttagatatatccccctttctgggtgaactataggctctgtgcctctcagacaaattctgatctctaagagatccccagacctcacttgcctctgcctccatcttggccctgattcaaccctaagataatagcacaacaaaattcttcataaagatatttttattcacctgttccgtgctatatggaggaggccaagtccatttagtgacatttcttcccataatgtgagtggggaggattgtggggaggaggggctttgggttcctgtgtttgtgcatatgaagggagatgggggttaggtggaggaggagagcagcgtggttagctaaggttattgctttttgtggcaaatctaattaaatgacaggaatctcttcacgataaaaaaaaaaaaaaaa

SEQ ID NO: 214 - DNA, 1937 bp, Homo sapiens
  ref <308>: DATABASE ACCESSION NUMBER: NCBI / NM_002631
  ref <309>: DATABASE ENTRY DATE: 2011-11-19
  ref <313>: RELEVANT RESIDUES IN SEQ ID NO: (1)..(1937)
ggccgcagtttctggagggagccgctgcgggtctttccctcactcgtcctccgcgcgtcgccgctcttcggttctgctctgtccgccgccatggcccaagctgacatcgcgctgatcggattggccgtcatgggccagaacttaattctgaacatgaatgaccacggctttgtggtctgtgcttttaataggactgtctccaaagttgatgatttcttggccaatgaggcaaagggaaccaaagtggtgggtgcccagtccctgaaagagatggtctccaagctgaagaagccccggcggatcatcctcctggtgaaggctgggcaagctgtggatgatttcatcgagaaattggtaccattgttggatactggtgacatcatcattgacggaggaaattctgaatatagggacaccacaagacggtgccgagacctcaaggccaagggaattttatttgtggggagcggagtcagtggtggagaggaaggggcccggtatggcccatcgctcatgccaggagggaacaaagaagcgtggccccacatcaagaccatcttccaaggcattgctgcaaaagtgggaactggagaaccctgctgtgactgggtgggagatgagggagcaggccacttcgtgaagatggtgcacaacgggatagagtatggggacatgcagctgatctgtgaggcataccacctgatgaaagacgtgctgggcatggcgcaggacgagatggcccaggcctttgaggattggaataagacagagctagactcattcctgattgaaatcacagccaatattctcaagttccaagacaccgatggcaaacacctgctgccaaagatcagggacagcgcggggcagaagggcacagggaagtggaccgccatctccgccctggaatacggcgtacccgtcaccctcattggagaagctgtctttgctcggtgcttatcatctctgaaggatgagagaattcaagctagcaaaaagctgaagggtccccagaagttccagtttgatggtgataagaaatcattcctggaggacattcggaaggcactctacgcttccaagatcatctcttacgctcaaggctttatgctgctaaggcaggcagccaccgagtttggctggactctcaattatggtggcatcgccctgatgtggagagggggctgcatcattagaagtgtattcctaggaaagataaaggatgcatttgatcgaaacccggaacttcagaacctcctactggacgacttctttaagtcagctgttgaaaactgccaggactcctggcggcgggcagtcagcactggggtccaggctggcattcccatgccctgttttaccactgccctctccttctatgacgggtacagacatgagatgcttccagccagcctcatccaggctcagcgggattacttcggggctcacacctatgaactcttggccaaaccagggcagtttatccacaccaactggacaggccatggtggcaccgtgtcatcctcgtcatacaatgcctgatcatgctgctcctgtcaccctccacgattccacagaccaggacattccatgtgcctcatggcactgccacctggccctttgccctattttctgttcagttttttaaaagtgttgtaagagactcctgaggaagacacacagtttatttgtaaagtagctctgtgagagccaccatgccctctgcccttgcctcttgggactgaccaggagctgctcatgtgcgtgagagtgggaaccatctccttgcggcagtggcttccgcgtgccccgtgtgctggtgcggttcccatcacgcagacaggaagggtgtttgcgcactctgatcaactggaacctctgtatcatgcggctgaattccctttttcctttactcaataaaagctacatcacactga

SEQ ID NO: 215 - DNA, 1263 bp, Homo sapiens
  ref <308>: DATABASE ACCESSION NUMBER: NCBI / NM_002574
  ref <309>: DATABASE ENTRY DATE: 2011-12-19
  ref <313>: RELEVANT RESIDUES IN SEQ ID NO: (1)..(1263)
gactctcgcgagatccctactggctataaaggcagcgccccggagagctcttgcgcgtcttgttcttgcctggtgtcggtggttagtttctgcgacttgtgttgggactggtgagtgtgggcagtgcggcccctgcggagtgaggcgcggcgcgcccttcttgcctgttgcctcttcctcctcctgtccggggcccgcccgcgctcgggtgggggtgctgtgatgcgtgaggcagccgggggaggcccggagtccgagactgcttgagcgctgcgcacacccctctcgtgggccccccacgtaggtgcgggaacctggttgaaccccaagctgataggaagatgtcttcaggaaatgctaaaattgggcaccctgcccccaacttcaaagccacagctgttatgccagatggtcagtttaaagatatcagcctgtctgactacaaaggaaaatatgttgtgttcttcttttaccctcttgacttcacctttgtgtgccccacggagatcattgctttcagtgatagggcagaagaatttaagaaactcaactgccaagtgattggtgcttctgtggattctcacttctgtcatctagcatgggtcaatacacctaagaaacaaggaggactgggacccatgaacattcctttggtatcagacccgaagcgcaccattgctcaggattatggggtcttaaaggctgatgaaggcatctcgttcaggggcctttttatcattgatgataagggtattcttcggcagatcactgtaaatgacctccctgttggccgctctgtggatgagactttgagactagttcaggccttccagttcactgacaaacatggggaagtgtgcccagctggctggaaacctggcagtgataccatcaagcctgatgtccaaaagagcaaagaatatttctccaagcagaagtgagcgctgggctgttttagtgccaggctgcggtgggcagccatgagaacaaaacctcttctgtattttttttttccattagtaaaacacaagacttcagattcagccgaattgtggtgtcttacaaggcaggcctttcctacagggggtggagagaccagcctttcttcctttggtaggaatggcctgagttggcgttgtgggcaggctactggtttgtatgatgtattagtagagcaacccattaatcttttgtagtttgtattaaacttgaactgagaccttgatgagtctttaaaaaaaaaaaaaaaaaaaaaaaaaaaaa

SEQ ID NO: 216 - DNA, 846 bp, Homo sapiens
  ref <308>: DATABASE ACCESSION NUMBER: NCBI / NM_002512
  ref <309>: DATABASE ENTRY DATE: 2011-12-19
  ref <313>: RELEVANT RESIDUES IN SEQ ID NO: (1)..(846)
tgcctggcgagggcgcgccccggctgggcgtggacactgttctccggccgcgtcgggccgggcgggtggggcgttcctgcgggttgggcggctgggccctccggggtgtggccaccccgcgctccgccctgcgcccctcctccgccgccggctcccgggtgtggtggtcgcaccagctctctgctctcccagcgcagcgccgccgcccggcccctccagcttcccggaccatggccaacctggagcgcaccttcatcgccatcaagccggacggcgtgcagcgcggcctggtgggcgagatcatcaagcgcttcgagcagaagggattccgcctcgtggccatgaagttcctccgggcctctgaagaacacctgaagcagcactacattgacctgaaagaccgaccattcttccctgggctggtgaagtacatgaactcagggccggttgtggccatggtctgggaggggctgaacgtggtgaagacaggccgagtgatgcttggggagaccaatccagcagattcaaagccaggcaccattcgtggggacttctgcattcaggttggcaggaacatcattcatggcagtgattcagtaaaaagtgctgaaaaagaaatcagcctatggtttaagcctgaagaactggttgactacaagtcttgtgctcatgactgggtctatgaataagaggtggacacaacagcagtctccttcagcacggcgtggtgtgtccctggacacagctcttcattccattgacttagaggcaacaggattgatcattcttttatagagcatatttgccaataaagcttttggaagccggaaaaaaaaaaaaaaaaaa

SEQ ID NO: 217 - DNA, 1632 bp, Homo sapiens
  ref <308>: DATABASE ACCESSION NUMBER: NCBI / NM_002455
  ref <309>: DATABASE ENTRY DATE: 2011-12-18
  ref <313>: RELEVANT RESIDUES IN SEQ ID NO: (1)..(1632)
aagccccagcccggcctccgctccggccgccgccaccgcccctgttttgtttccatggcgacaggcggcgcagggcccgctccaaacataacgcgctgtggaaaacatgctgctcgggggacccccccgcagtccccgctcggggacgagccccaaggggccctggagcagtacaggccacgtgcagtttggcaagagcccccagacctggcccaggcgcacaagaccccgctctccagagcctgccgcgccttcaggggttcggggctccacttggacgaggcgccgtgacactccgaggcgcgccgggccgacagcgctgtcccgctacgtgggccacctctggatgggccggcggccgccctcccccgaggcccgcggcccagtcccccgcagttcagctgccagtcgggccagaagaagcctcgcctccccggggatctccccaggccccctgaccgcaacgatcggaggggcggtggcggggggcgggcccaggcaggggagggcagaagcacacaaggaagtgtttccgggacagagggtgggcaagatggcggcgcccatggagctgttctgctggtcagggggctgggggctgccgtcagtggacctggacagcctggccgtgctgacctatgccagatttactggtgctccactgaaggtacacaagatcagcaacccctggcagagcccttcaggaactctgcctgcccttcggaccagtcatggagaggtcatctcagttccacacaagatcatcacccaccttcgaaaagagaagtacaatgctgattatgatctgtcagctcggcaaggggcagacaccctggccttcatgtctctcctggaggagaagttgctcccggtgctggtacatactttttggatagacaccaagaactacgtggaagtgacccggaagtggtatgcagaggctatgccctttcccctcaacttcttcctgcctggccgcatgcagcggcagtacatggaacggctacagctgctgactggggagcacaggcctgaggacgaggaagagctggagaaggagctgtaccgagaggctcgggagtgtctgaccctgctctctcagcgcctgggctctcaaaagttcttctttggagatgcccctgcctccttggacgccttcgtcttcagctacttggccctgctgctgcaggcaaagctgcccagtgggaagctgcaggtccacctgcgtgggctgcacaacctctgtgcctattgtacccacattctcagtctctacttcccctgggatggagctgaggtaccaccgcaacgccagacaccagcaggcccagagactgaggaggagccataccggcgccggaaccagatcctatctgtgctggcaggactggcagccatggtgggctacgccttgctcagcggcattgtctccatccagcgggcaacgcctgctcgggccccaggcacccggaccctgggcatggctgaggaggatgaagaggaatgatttgtcctcacgctcccaagactggtttttctactctcatgcattccagaggcccccgtgcctcctcgttgttggtacagccggacacggggtgctgccacccagaataaagccactcacactga

SEQ ID NO: 218 - DNA, 3981 bp, Homo sapiens
  ref <308>: DATABASE ACCESSION NUMBER: NCBI / NM_002444
  ref <309>: DATABASE ENTRY DATE: 2011-12-17
  ref <313>: RELEVANT RESIDUES IN SEQ ID NO: (1)..(3981)
cgacaggggcggctctttcctgggtggggtttgtgaagtcgtggcccgttagcaggaagcctaacagtcgccccgacgctagtgagggacccaatctgagtccccggccagccgaatccaagccgtgtgtactgcgtgctcagcactgcccgacagtcctagctaaacttcgccaactccgctgcctttgccgccaccatgcccaaaacgatcagtgtgcgtgtgaccaccatggatgcagagctggagtttgccatccagcccaacaccaccgggaagcagctatttgaccaggtggtgaaaactattggcttgagggaagtttggttctttggtctgcagtaccaggacactaaaggtttctccacctggctgaaactcaataagaaggtgactgcccaggatgtgcggaaggaaagccccctgctctttaagttccgtgccaagttctaccctgaggatgtgtccgaggaattgattcaggacatcactcagcgcctgttctttctgcaagtgaaagagggcattctcaatgatgatatttactgcccgcctgagaccgctgtgctgctggcctcgtatgctgtccagtctaagtatggcgacttcaataaggaagtgcataagtctggctacctggccggagacaagttgctcccgcagagagtcctggaacagcacaaactcaacaaggaccagtgggaggagcggatccaggtgtggcatgaggaacaccgtggcatgctcagggaggatgctgtcctggaatatctgaagattgctcaagatctggagatgtatggtgtgaactacttcagcatcaagaacaagaaaggctcagagctgtggctgggggtggatgccctgggtctcaacatctatgagcagaatgacagactaactcccaagataggcttcccctggagtgaaatcaggaacatctctttcaatgataagaaatttgtcatcaagcccattgacaaaaaagccccggacttcgtcttctatgctccccggctgcggattaacaagcggatcttggccttgtgcatggggaaccatgaactatacatgcgccgtcgcaagcctgataccattgaggtgcagcagatgaaggcacaggcccgggaggagaagcaccagaagcagatggagcgtgctatgctggaaaatgagaagaagaagcgtgaaatggcagagaaggagaaagagaagattgaacgggagaaggaggagctgatggagaggctgaagcagatcgaggaacagactaagaaggctcagcaagaactggaagaacagacccgtagggctctggaacttgagcaggaacggaagcgtgcccagagcgaggctgaaaagctggccaaggagcgtcaagaagctgaagaggccaaggaggccttgctgcaggcctcccgggaccagaaaaagactcaggaacagctggccttggaaatggcagagctgacagctcgaatctcccagctggagatggcccgacagaagaaggagagtgaggctgtggagtggcagcagaaggcccagatggtacaggaagacttggagaagacccgtgctgagctgaagactgccatgagtacacctcatgtggcagagcctgctgagaatgagcaggatgagcaggatgagaatggggcagaggctagtgctgacctacgggctgatgctatggccaaggaccgcagtgaggaggaacgtaccactgaggcagagaagaatgagcgtgtgcagaagcacctgaaggccctcacttcggagctggccaatgccagagatgagtccaagaagactgccaatgacatgatccatgctgagaacatgcgactgggccgagacaaatacaagaccctgcgccagatccggcagggcaacaccaagcagcgcattgacgaatttgagtctatgtaatgggcacccagcctctagggacccctcctccctttttccttgtccccacactcctacacctaactcacctaactcatactgtgctggagccactaactagagcagccctggagtcatgccaagcatttaatgtagccatgggaccaaacctagccccttagcccccacccacttccctgggcaaatgaatggctcactatggtgccaatggaacctcctttctcttctctgttccattgaatctgtatggctagaatatcctacttctccagcctagaggtactttccacttgattttgcaaatgcccttacacttactgttgtcctatgggagtcaagtgtggagtaggttggaagctagctcccctcctctcccctaccactgtcttcttcagggtcctgagatttacacggttggagtgttatgcggtctagggaatgagacaggacctaggatatcttctccaggatgtcaactgacctaaaatttgccctcccatcccgtttagagttatttaggctttgtaacgattgggggataaaaagatgttcagtcatttttgtttctacctcccagatcggatctgttgcaaactcagcctcaataagccttgtcgttgactttagggactcaatttctccccagggtggatgggggaaatggtgccttcaagaccttcaccaaacatactagaagggcattggccattctattgtggcaaggctgagtagaagatcctaccccaattccttgtaggagtataggccggtctaaagtgagctctatgggcagatctaccccttacttattattccagatctgcagtcacttcgtgggatctgcccctccctgcttcaatacccaaatcctctccagctataacagtagggatgagtacccaaaagctcagccagccccatcaggactcttgtgaaaagagaggatatgttcacacctagcgtcagtattttccctgctaggggttttaggtctcttcccctctcagagctacttgggccatagctcctgctccacagccatcccagccttggcatctagagcttgatgccagtaggctcaactagggagtgagtgcaaaaagctgagtatggtgagagaagcctgtgccctgatccaagtttactcaaccctctcaggtgaccaaaatccccttctcatcactcccctccaaagaggtgactgggccctgcctctgtttgacaaacctctaacccaggtcttgacaccagctgttctgtcccttggagctgtaaaccagagagctgctggggattctggcctagtcccttccacacccccaccccttgctctcaacccaggagcatccacctccttctctgtctcatgtgtgctcttcttctttctacagtattatgtactctactgatatctaaatattgatttctgccttccttgctaatgcaccattagaagatattagtcttggggcaggatgattttggcctcattactttaccacccccacacctggaaagcatatactatattacaaaatgacattttgccaaaattattaatataagaagctttcagtattagtgatgtcatctgtcactataggtcatacaatccattcttaaagtacttgttatttgtttttattattactgtttgtcttctccccagggttcagtcctcaaggggccatcctgtcccaccatgcagtgcccctagcttagagcctccctcaattccccctggccaccaccccccactctgtgcctgaccttgaggagtcttgtgtgcattgctgtgaattagctcacttggtgatatgtcctatattggctaaattgaaacctggaattgtggggcaatctattaatagctgccttaaagtcagtaacttacccttagggaggctgggggaaaaggttagattttgtattcaggggttttttgtgtactttttgggttttttaaaaattgtttttggaggggtttatgctcaatccatgttctatttcagtgccaataaaatttaggaagacttcaaaaaaaaaaaa

SEQ ID NO: 219 - DNA, 3652 bp, Homo sapiens
  ref <308>: DATABASE ACCESSION NUMBER: NCBI / NM_000529
  ref <309>: DATABASE ENTRY DATE: 2011-11-19
  ref <313>: RELEVANT RESIDUES IN SEQ ID NO: (1)..(3652)
attccttctcattcattttgcccagaaagttcctgcttcagagctgaaggtgattgggagattttaacttagatctccagcaagtgctacaaggaagaaaagatcctgaagaatcaatcaagttttccgtgaagtcaagtccaagtaacatccccgccttaaccacaagcaggagaaatgaagcacattatcaactcgtatgaaaacatcaacaacacagcaagaaataattccgactgtcctcgtgtggttttgccggaggagatatttttcacaatttccattgttggagttttggagaatctgatcgtcctgctggctgtgttcaagaataagaatctccaggcacccatgtactttttcatctgtagcttggccatatctgatatgctgggcagcctatataagatcttggaaaatatcctgatcatattgagaaacatgggctatctcaagccacgtggcagttttgaaaccacagccgatgacatcatcgactccctgtttgtcctctccctgcttggctccatcttcagcctgtctgtgattgctgcggaccgctacatcaccatcttccacgcactgcggtaccacagcatcgtgaccatgcgccgcactgtggtggtgcttacggtcatctggacgttctgcacggggactggcatcaccatggtgatcttctcccatcatgtgcccacagtgatcaccttcacgtcgctgttcccgctgatgctggtcttcatcctgtgcctctatgtgcacatgttcctgctggctcgatcccacaccaggaagatctccaccctccccagagccaacatgaaaggggccatcacactgaccatcctgctcggggtcttcatcttctgctgggccccctttgtgcttcatgtcctcttgatgacattctgcccaagtaacccctactgcgcctgctacatgtctctcttccaggtgaacggcatgttgatcatgtgcaatgccgtcattgaccccttcatatatgccttccggagcccagagctcagggacgcattcaaaaagatgatcttctgcagcaggtactggtagaatggctgatccctggttttagaatccatgggaataacgttgccaagtgccagaatagtgtaacattccaacaaatgccagtgctcctcactggccttccttccctaatggatgcaaggatgatcccaccagctagtgtttctaatagctaggttctatgtgaacagtcttattgtaggggcaacctcttaactttgtgactggacagataaaacgatgtagtaaaagaaggatagaatacaaagtattaggtaggtacaaaagtaattaaggtttttgccattactttcaatgaccaaaaattgcaattacttttgcaccaatctagtaaaacagcaataaaaattcaagggctttgggctaaggcaaagacttgctttcctgtggacatctaacaagccagttctgaggtggcctttccaggtggaggccattgcagccaatttccagaagttaagtacctggacatgcgactccaggcagaagatgtagggtctctgtaagccaataataaattggaaggaatgcattgctgcagctgaatttgtctgtctcccacagccatgtggaatctccaccctcctctttctccctgttagtctgatgtattgatgccacctcagtttcagaaagtaggctgagtataaactataaatgtcaaataacgagcttcgagtttccaatgataaatggaccttctctgttagtcttctttgctcactcagtatcccactggccttaaaaccctttcctgttacatttcctcatgctttatgagcatacatttcaaaggaagaaatgaaaatttaatccatttagttcccatgtgggaatacataaaggccagatgaaaattgtcactatttgaagaagctgtaaccaaactatgtgtgttacaatgtagaagtacaagaaaagagccccaacatgtattttaagaaataaagagagagagacagagacagacagagagagagagagagagagagagagagagtgtgtgtgtgtgtgtgtgtgtgtgtgtgtgtgtgtgtgtgtgtgtgtgtgtattttccccatgcttttggactatggggaaaaccaaaaccaaagcaagacatcaagcaatggtgctgttattatagccccaagtcaaagacctgagggaggcaaacaccacctcattctgcagatgaatgtgaaagcagacccagtcactgggaaatgtcatcctcccatcagccaagatgccagcaatggaagagtggcaaccccagtaggaataaaagaaacataatttgcaagttcattcatttttaatagctaaaaatcagcttaaaggagaagcacatcctgattgtaagtccccactaagttggagggtgacttgaatggggtgaaaggtgaaagggacagaggagagcagtggggcttcagaggccaccaggctcaggatctgcaggatggatggtatcttccagaacaggcaatgctttgccctcaggagaatttcccagagctgctgaggggagaagacagccacacacaggacagaccatttggtgatgggtttgatattagaagtggcagggacaggaacttcagaagcaaaggaggcaaggcagctggagtcaagtgaggacagtggcaggcgtgctttcacatggcctgtcccacagatggaggtgaaaggtgcaccttcttgtcctctgttctgtagaaatccttccctgtttgatccttcccctgccaaatgaactatgttactctaatactaacctgtattaattaatatatgagatatatataagttaatttttcatgaaatctaaagcacaaccctagaactaatttttaaaagtgttatttctaccattgaaaaagtaatgtataacatattttatgtgattaaagtgcgtattctcaataagaggtaacctttttttgatgctgcaatgctctgtgataccacagaggtaagcaatgccacttaacctgtatcataaatagtcccaaactgctcttcctataaaattctgcctttgtcaacagctttgctgtctcctaatcactctcaagctctctgctgtgcatgtgactgttgtcagaaggaaaatcaccaagaaacttcacctctcactgcctttgatttgttgcagttaatctaagaaacaaaatgaagatggctagtctaatggtggatgaaacaaaaatgaagtctgagtgctaattcagagaacttgcaattccagacattttcaattctaggtcttctgctatattccaatcagaacagaagcttcagggctcatagttactgagaaaactcacgtttttctacctctaacttcatatagaattccaaatgaaagcaccaccaaactgcacatatttgtgtgaggaagatcaacaagcttcagacttttcccatgaggacttaattcttttatcaaattacccaatttttaaactgctgtgtggatactgtgagtgttcagctttatcgatgacctagccttggaccagatagctgaaaatgttcaggatgtgtactcaagctgatagtaattctgagccctgtctaataaaaaaggaaggatgt

SEQ ID NO: 220 - DNA, 5052 bp, Homo sapiens
  ref <308>: DATABASE ACCESSION NUMBER: NCBI / NM_003573
  ref <309>: DATABASE ENTRY DATE: 2011-11-19
  ref <313>: RELEVANT RESIDUES IN SEQ ID NO: (1)..(5052)
atgggagacgtaaaagcgttgctgtttgtcgctgctgcccgggccagacgtctaggaggagccgctgcatccgagtccctggctgtctccgaagccttctgcagggtccgaagctgccagcccaaaaagtgtgcaggcccccagcggtgcctgaacccagtgcctgcagtgcccagtcccagccccagcgtgaggaagagacaggtgtccctcaactggcagccactgacgctccaggaggccagagctctactgaagcggcggcggccccgggggccagggggccggggactactgagaaggaggcccccacagcgtgcccccgctggcaaggccccggtcctgtgtcccttgatctgtcacaatggcggtgtgtgcgtgaagcctgaccgctgcctctgtcccccggacttcgctggcaagttctgccagttgcactcctcgggcgcccggcccccggccccggctgtaccaggcctcacccgctccgtgtacactatgccactggccaaccaccgcgacgacgagcacggcgtggcatctatggtgagcgtccacgtggagcacccgcaggaggcgtcggtggtggtgcaccaggtggagcgtgtgtctggcccttgggaggaggcggacgctgaggcggtggcgcgggcggaagcggcggcgcgggcggaggcggcagcgccctacacggtgttggcacagagcgcgccgcgggaggacggctactcagatgcctcgggcttcggttactgctttcgggagctgcgcggaggcgaatgcgcgtccccgctgcccgggctccggacgcaggaggtctgctgccgaggggccggcttggcctggggcgttcacgactgtcagctgtgctccgagcgcctggggaactccgaaagagtgagcgccccagatggaccttgtccaaccggctttgaaagagttaatgggtcctgcgaagatgtggatgagtgcgcgactggcgggcgctgccagcacggcgagtgtgcaaacacgcgcggcgggtacacgtgtgtgtgccccgacggctttctgctcgactcgtcccgcagcagctgcatctcccaacacgtgatctcagaggccaaagggccctgcttccgcgtgctccgcgacggcggctgttcgctgcccattctgcggaacatcactaaacagatctgctgctgcagccgcgtaggcaaggcctggggccggggctgccagctctgcccacccttcggctcagagggtttccgggagatctgcccggctggtcctggttaccactactcggcctccgacctccgctacaacaccagacccctgggccaggagccaccccgagtgtcactcagccagcctcgtaccctgccagccacctctcggccatctgcaggctttctgcccacccatcgcctggagccccggcctgaaccccggcccgatccccggcccggccctgagcttcccttgcccagcatccctgcctggactggtcctgagattcctgaatcaggtccctcctccggcatgtgtcagcgcaacccccaggtctgcggcccaggacgctgcatttcccggcccagcggctacacctgcgcttgcgactctggcttccggctcagcccccagggcacccgatgcattgatgtggacgaatgtcgccgcgtgcccccgccctgtgctcccgggcgctgcgagaactcaccaggcagcttccgctgcgtgtgcggcccgggcttccgagccggcccacgggctgcggaatgcctggatgtggacgagtgccaccgcgtgccgccgccgtgtgacctcgggcgctgcgagaacacgccaggcagcttcctgtgcgtgtgccccgccgggtaccaggctgcaccgcacggagccagctgccaggatgtggatgaatgcacccagagcccaggcctgtgtggccgaggggcctgcaagaacctgcctggctctttccgctgtgtttgcccggctggcttccggggctcggcgtgtgaagaggatgtggatgagtgtgcccaggagccgccgccctgtgggcccggccgctgtgacaacacggcaggctcctttcactgtgcctgccctgctggcttccgctcccgagggcccggggccccctgccaagatgtggatgagtgtgcccgaagccccccaccctgcacctacggccggtgtgagaacacagaaggcagcttccagtgtgtctgccccatgggcttccaacccaacactgctggctccgagtgcgaggatgtggatgagtgtgagaaccacctcgcatgccctgggcaggagtgtgtgaactcgcccggctccttccagtgcaggacctgtccttctggccaccacctgcaccgtggcagatgcactgatgtggacgaatgcagttcgggtgcccctccctgtggtccccacggccactgcactaacaccgaaggctccttccgctgcagctgcgcgccaggctaccgggcgccgtcgggtcggcccgggccctgcgcagacgtgaacgagtgcctggagggcgatttctgcttccctcacggcgagtgcctcaacactgacggctcctttgcctgtacttgtgcccctggctaccgacccggaccccgcggagcctcttgcctcgacgttgacgagtgcagcgaggaggacctttgccagagcggcatctgtaccaacaccgacggctccttcgagtgcatctgtcctccgggacaccgcgctggcccggacctcgcctcctgcctcgacgtggacgaatgtcgcgagcgaggcccagccctgtgcgggtcgcagcgctgtgagaactctcccggctcctaccgctgtgtccgggactgcgatcctgggtaccacgcgggccccgagggcacctgtgacgatgtggatgagtgccaagaatatggtcccgagatttgtggagcccagcgttgtgagaacacccctggctcctaccgctgcacaccagcctgtgaccctggctatcagcccacgccagggggcggatgccaggatgtggacgaatgccggaaccggtccttctgcggtgcccacgccgtgtgccagaacctgcccggctccttccagtgcctctgtgaccagggttacgagggggcacgggatgggcgtcactgcgtggatgtgaacgagtgtgaaacactacagggtgtatgtggagctgccctgtgtgaaaatgtcgaaggctccttcctctgtgtctgccccaacagcccggaagagtttgaccccatgactggacgctgtgttcccccacgaacttctgctggcacgttcccaggctcgcagccccaggcacctgctagccccgttctgcccgccaggccacctccgccacccctgccccgccgacccagcacacctaggcagggccctgtggggagtgggcgccgggagtgctactttgacacagcggccccggatgcatgtgacaacatcctggctcggaatgtgacatggcaggagtgctgctgtactgtgggtgagggctggggcagcggctgccgcatccagcagtgcccgggcaccgagacagctgagtaccagtcattgtgccctcacggccggggctacctggcgcccagtggagacctgagcctccggagagacgtggacgaatgtcagctcttccgagaccaggtgtgcaagagtggcgtgtgtgtgaacacggccccgggctactcatgctattgcagcaacggctactactaccacacacagcggctggagtgcatcgacaatgacgagtgcgccgatgaggaaccggcctgtgagggcggccgctgtgtcaacactgtgggctcttatcactgtacctgcgagcccccactggtgctggatggctcgcagcgccgctgcgtctccaacgagagccagagcctcgatgacaatctgggagtgtgctggcaggaagtgggggctgacctcgtgtgcagccaccctcggctggaccgtcaggccacctacacagagtgctgctgcctgtatggagaggcctggggcatggactgcgccctctgccctgcgcaggactcagatgacttcgaggccctgtgcaatgtgctacgcccccccgcatatagccccccgcgaccaggtggctttggactcccctacgagtacggcccagacttaggtccaccttaccagggcctcccatatgggcctgagttgtacccaccacctgcgctaccctacgacccctacccaccgccacctgggcccttcgcccgccgggaggctccttatggggcaccccgcttcgacatgccagactttgaggacgatggtggcccctatggcgaatctgaggctcctgcgccacctggcccgggcacccgctggccctatcggtcccgggacacccgccgctccttcccagagcccgaggagcctcctgaaggtggaagctatgctggttccctggctgagccctacgaggagctggaggcggaggagtgcgggatcctggacggctgcaccaacggccgctgcgtgcgcgtccccgaaggcttcacctgccgttgcttcgacggctaccgcctggacatgacccgcatggcctgcgttgacatcaacgagtgtgatgaggccgaggctgcctccccgctgtgcgtcaacgcgcgttgcctcaacacggatggctccttccgctgcatctgccgcccgggattcgcacccacgcaccagccgcaccactgtgcgcccgcacggccccgggcctgagccctggcacccgctggccgcccacccgcgcccgccactcggggcccctgccgcgcatcctgcagcccgcttatgcgtatgtgcacggggccgcccgcctggacctggagaagggacctacggacgcctggaagctgcgacgccctgcactgctcccgcctccaccagcgcctcccactgatgtcgtggtcccgggcctggcccaggggcccctttacatgccctctcccttttataaaattttccattaaaaaccacctattttctatcaaaaaaaaaaaaaaaaaa

SEQ ID NO: 221 - DNA, 1274 bp, Homo sapiens
  ref <308>: DATABASE ACCESSION NUMBER: NCBI / NM_002315
  ref <309>: DATABASE ENTRY DATE: 2011-11-19
  ref <313>: RELEVANT RESIDUES IN SEQ ID NO: (1)..(1274)
cagcgggagacggccacgagattcccccatctctttgaatataattttagattgagattcagattaaatccgaggggaaaacactttatgaggctgaaagctgtgtcgttgccagagacagggttatgagctatcaaatgcaattacattaagacagattatactgggcaaattgagccatttagaaggtgagaatcaaagaaacggctctgatcctcttttcccccttctctctccctctccctctctctctaaattgcagttcgtagttccttccaattcggaggcacaaaagtaggtgagactgcttttgtatctgcgaagtgcttcactcctgaatgtaattctagctgagtgcaatctaggttaagagccggacaagcgggtaattagagcccgctagctgcccgaggaccggccgccccgccaaagcgcgccccgagtcggcgcccttctcccggccgagcctagctgcggctggacacggagcgcccgagatgatggtgctggacaaggaggacggcgtgccgatgctctccgtccagcccaaagggaagcagaagggctgtgcgggctgtaaccgcaagatcaaggaccgctatctgctgaaggcattggacaagtactggcacgaagactgcctcaagtgtgcgtgctgtgactgccgcctgggcgaggtgggctccaccctctacaccaaggccaacctcatcctgtgccgacgcgactacctgaggctctttggcaccacagggaactgtgctgcttgcagcaagctgatcccagccttcgagatggtgatgcgggcccgggacaacgtgtatcacctcgactgcttcgcctgccagctctgcaaccagagattttgtgtgggagacaaattcttcctgaagaacaacatgatcttgtgtcagatggactatgaggaagggcagctcaatggcacctttgaatcccaagttcagtaacgcccggcgcctggcctccaggcccgtctgtccatctgcccgcctgcccacctgcctggccggccagccagccactctaccagtgcaggctggccagccgctctcctgccacattagaacttctccgtcctcgatgggagggatggcccttcctcctccaccaccgcccgtctgtgtgtgacccctcctggggccaggccgggcctgtacagtctgtcttctgtatataaatgggaacatttattttatgagaaatgtaatgcgattttattactggcgtggattaaacttatgaatgtttccggg

SEQ ID NO: 222 - DNA, 1712 bp, Homo sapiens
  ref <308>: DATABASE ACCESSION NUMBER: NCBI / NM_000884
  ref <309>: DATABASE ENTRY DATE: 2011-12-24
  ref <313>: RELEVANT RESIDUES IN SEQ ID NO: (1)..(1712)
cgaaatcggctggtttatattggcgcggcccagacggcagaggtctctgcggcgcggtcctcggagacacgcggcggtgtcctgtgttggccatggccgactacctgattagtgggggcacgtcctacgtgccagacgacggactcacagcacagcagctcttcaactgcggagacggcctcacctacaatgactttctcattctccctgggtacatcgacttcactgcagaccaggtggacctgacttctgctctgaccaagaaaatcactcttaagaccccactggtttcctctcccatggacacagtcacagaggctgggatggccatagcaatggcgcttacaggcggtattggcttcatccaccacaactgtacacctgaattccaggccaatgaagttcggaaagtgaagaaatatgaacagggattcatcacagaccctgtggtcctcagccccaaggatcgcgtgcgggatgtttttgaggccaaggcccggcatggtttctgcggtatcccaatcacagacacaggccggatggggagccgcttggtgggcatcatctcctccagggacattgattttctcaaagaggaggaacatgactgtttcttggaagagataatgacaaagagggaagacttggtggtagcccctgcaggcatcacactgaaggaggcaaatgaaattctgcagcgcagcaagaagggaaagttgcccattgtaaatgaagatgatgagcttgtggccatcattgcccggacagacctgaagaagaatcgggactacccactagcctccaaagatgccaagaaacagctgctgtgtggggcagccattggcactcatgaggatgacaagtataggctggacttgctcgcccaggctggtgtggatgtagtggttttggactcttcccagggaaattccatcttccagatcaatatgatcaagtacatcaaagacaaataccctaatctccaagtcattggaggcaatgtggtcactgctgcccaggccaagaacctcattgatgcaggtgtggatgccctgcgggtgggcatgggaagtggctccatctgcattacgcaggaagtgctggcctgtgggcggccccaagcaacagcagtgtacaaggtgtcagagtatgcacggcgctttggtgttccggtcattgctgatggaggaatccaaaatgtgggtcatattgcgaaagccttggcccttggggcctccacagtcatgatgggctctctcctggctgccaccactgaggcccctggtgaatacttcttttccgatgggatccggctaaagaaatatcgcggtatgggttctctcgatgccatggacaagcacctcagcagccagaacagatatttcagtgaagctgacaaaatcaaagtggcccagggagtgtctggtgctgtgcaggacaaagggtcaatccacaaatttgtcccttacctgattgctggcatccaacactcatgccaggacattggtgccaagagcttgacccaagtccgagccatgatgtactctggggagcttaagtttgagaagagaacgtcctcagcccaggtggaaggtggcgtccatagcctccattcgtatgagaagcggcttttctgaaaagggatccagcacacctcctcggtttttttttcaataaaagtttagaaagaaaaaaaaaaaaaaaaaaaaaaa

SEQ ID NO: 223 - DNA, 733 bp, Homo sapiens
  ref <308>: DATABASE ACCESSION NUMBER: NCBI / NM_003641
  ref <309>: DATABASE ENTRY DATE: 2011-11-26
  ref <313>: RELEVANT RESIDUES IN SEQ ID NO: (1)..(733)
aaacagcaggaaatagaaacttaagagaaatacacacttctgagaaactgaaacgacaggggaaaggaggtctcactgagcaccgtcccagcatccggacaccacagcggcccttcgctccacgcagaaaaccacacttctcaaaccttcactcaacacttccttccccaaagccagaagatgcacaaggaggaacatgaggtggctgtgctgggggcaccccccagcaccatccttccaaggtccaccgtgatcaacatccacagcgagacctccgtgcccgaccatgtcgtctggtccctgttcaacaccctcttcttgaactggtgctgtctgggcttcatagcattcgcctactccgtgaagtctagggacaggaagatggttggcgacgtgaccggggcccaggcctatgcctccaccgccaagtgcctgaacatctgggccctgattctgggcatcctcatgaccattggattcatcctgttactggtattcggctctgtgacagtctaccatattatgttacagataatacaggaaaaacggggttactagtagccgcccatagcctgcaacctttgcactccactgtgcaatgctggccctgcacgctggggctgttgcccctgcccccttggtcctgcccctagatacagcagtttatacccacacacctgtctacagtgtcattcaataaagtgcacgtgcttgtgaaaaaaaaaaaaaaaaa

SEQ ID NO: 224 - DNA, 3884 bp, Homo sapiens
  ref <308>: DATABASE ACCESSION NUMBER: NCBI / NM_000841
  ref <309>: DATABASE ENTRY DATE: 2011-12-17
  ref <313>: RELEVANT RESIDUES IN SEQ ID NO: (1)..(3884)
ccgagtgacaaggaggtgggagagggtagcagcatgggctacgcggttggctgccctcagtccccctgctgctgaagctgccctgcccatgcccacccaggccgtggggccaggggcctgccagggctaggagtgggcctgccgttcatgggtctctagggatttccgagatgcctgggaagagaggcttgggctggtggtgggcccggctgcccctttgcctgctcctcagcctttacggcccctggatgccttcctccctgggaaagcccaaaggccaccctcacatgaattccatccgcatagatggggacatcacactgggaggcctgttcccggtgcatggccggggctcagagggcaagccctgtggagaacttaagaaggaaaagggcatccaccggctggaggccatgctgttcgccctggatcgcatcaacaacgacccggacctgctgcctaacatcacgctgggcgcccgcattctggacacctgctccagggacacccatgccctcgagcagtcgctgacctttgtgcaggcgctcatcgagaaggatggcacagaggtccgctgtggcagtggcggcccacccatcatcaccaagcctgaacgtgtggtgggtgtcatcggtgcttcagggagctcggtctccatcatggtggccaacatccttcgcctcttcaagataccccagatcagctacgcctccacagcgccagacctgagtgacaacagccgctacgacttcttctcccgcgtggtgccctcggacacgtaccaggcccaggccatggtggacatcgtccgtgccctcaagtggaactatgtgtccacagtggcctcggagggcagctatggtgagagcggtgtggaggccttcatccagaagtcccgtgaggacgggggcgtgtgcatcgcccagtcggtgaagataccacgggagcccaaggcaggcgagttcgacaagatcatccgccgcctcctggagacttcgaacgccagggcagtcatcatctttgccaacgaggatgacatcaggcgtgtgctggaggcagcacgaagggccaaccagacaggccatttcttctggatgggctctgacagctggggctccaagattgcacctgtgctgcacctggaggaggtggctgagggtgctgtcacgatcctccccaagaggatgtccgtacgaggcttcgaccgctacttctccagccgcacgctggacaacaaccggcgcaacatctggtttgccgagttctgggaggacaacttccactgcaagctgagccgccacgccctcaagaagggcagccacgtcaagaagtgcaccaaccgtgagcgaattgggcaggattcagcttatgagcaggaggggaaggtgcagtttgtgatcgatgccgtgtacgccatgggccacgcgctgcacgccatgcaccgtgacctgtgtcccggccgcgtggggctctgcccgcgcatggaccctgtagatggcacccagctgcttaagtacatccgaaacgtcaacttctcaggcatcgcagggaaccctgtgaccttcaatgagaatggagatgcgcctgggcgctatgacatctaccaataccagctgcgcaacgattctgccgagtacaaggtcattggctcctggactgaccacctgcaccttagaatagagcggatgcactggccggggagcgggcagcagctgccccgctccatctgcagcctgccctgccaaccgggtgagcggaagaagacagtgaagggcatgccttgctgctggcactgcgagccttgcacagggtaccagtaccaggtggaccgctacacctgtaagacgtgtccctatgacatgcggcccacagagaaccgcacgggctgccggcccatccccatcatcaagcttgagtggggctcgccctgggccgtgctgcccctcttcctggccgtggtgggcatcgctgccacgttgttcgtggtgatcacctttgtgcgctacaacgacacgcccatcgtcaaggcctcgggccgtgaactgagctacgtgctgctggcaggcatcttcctgtgctatgccaccaccttcctcatgatcgctgagcccgaccttggcacctgctcgctgcgccgaatcttcctgggactagggatgagcatcagctatgcagccctgctcaccaagaccaaccgcatctaccgcatcttcgagcagggcaagcgctcggtcagtgccccacgcttcatcagccccgcctcacagctggccatcaccttcagcctcatctcgctgcagctgctgggcatctgtgtgtggtttgtggtggacccctcccactcggtggtggacttccaggaccagcggacactcgacccccgcttcgccaggggtgtgctcaagtgtgacatctcggacctgtcgctcatctgcctgctgggctacagcatgctgctcatggtcacgtgcaccgtgtatgccatcaagacacgcggcgtgcccgagaccttcaatgaggccaagcccattggcttcaccatgtacaccacttgcatcgtctggctggccttcatccccatcttctttggcacctcgcagtcggccgacaagctgtacatccagacgacgacgctgacggtctcggtgagtctgagcgcctcggtgtccctgggaatgctctacatgcccaaagtctacatcatcctcttccacccggagcagaacgtgcccaagcgcaagcgcagcctcaaagccgtcgttacggcggccaccatgtccaacaagttcacgcagaagggcaacttccggcccaacggagaggccaagtctgagctctgcgagaaccttgaggccccagcgctggccaccaaacagacttacgtcacttacaccaaccatgcaatctagcgagtccatggagctgagcagcaggaggaggagccgtgaccctgtggaaggtgcgtcgggccagggccacacccaagggcccagctgtcttgcctgcccgtgggcacccacggacgtggcttggtgctgaggatagcagagcccccagccatcactgctggcagcctgggcaaaccgggtgagcaacaggaggacgaggggccggggcggtgccaggctaccacaagaacctgcgtcttggaccattgcccctcccggccccaaaccacaggggctcaggtcgtgtgggccccagtgctagatctctccctcccttcgtctctgtctgtgctgttggcgacccctctgtctgtctccagccctgtctttctgttctcttatctctttgtttcaccttttccctctctggcgtccccggctgcttgtactcttggccttttctgtgtctcctttctggctcttgcctccgcctctctctctcatcctctttgtcctcagctcctcctgctttcttgggtcccaccagtgtcacttttctgccgttttctttcctgttctcctctgcttcattctcgtccagccattgctcccctctccctgccacccttccccagttcaccaaaccttacatgttgcaaaagagaaaaaaggaaaaaaaatcaaaacacaaaaaagccaaaacgaaaacaaatctcgagtgtgttgccaagtgctgcgtcctcctggtggcctctgtgtgtgtccctgtggcccgcagcctgcccgcctgccccgcccatctgccgtgtgtcttgcccgcctgccccgcccgtctgccgtctgtcttgcccgcctgcccgcctgcccctcctgccgaccacacggagttcagtgcctgggtgtttggtgatggttattgacgacaatgtgtagcgcatgattgtttttataccaagaacatttctaataaaaataaacacatggttttgcaaaaaa

SEQ ID NO: 225 - DNA, 2200 bp, Homo sapiens
  ref <308>: DATABASE ACCESSION NUMBER: NCBI / NM_002070
  ref <309>: DATABASE ENTRY DATE: 2011-11-13
  ref <313>: RELEVANT RESIDUES IN SEQ ID NO: (1)..(2200)
actgccgacccgagtgcttcccgcagagggctggtggtgggagcggagtgggtcgggcggggccgagccgggccgtgggccgtgtgggggccgggcggcggccgggccggcggacggcgggatgggctgcaccgtgagcgccgaggacaaggcggcggccgagcgctctaagatgatcgacaagaacctgcgggaggacggagagaaggcggcgcgggaggtgaagttgctgctgttgggtgctggggagtcagggaagagcaccatcgtcaagcagatgaagatcatccacgaggatggctactccgaggaggaatgccggcagtaccgggcggttgtctacagcaacaccatccagtccatcatggccattgtcaaagccatgggcaacctgcagatcgactttgccgacccctccagagcggacgacgccaggcagctatttgcactgtcctgcaccgccgaggagcaaggcgtgctccctgatgacctgtccggcgtcatccggaggctctgggctgaccatggtgtgcaggcctgctttggccgctcaagggaataccagctcaacgactcagctgcctactacctgaacgacctggagcgtattgcacagagtgactacatccccacacagcaagatgtgctacggacccgcgtaaagaccacggggatcgtggagacacacttcaccttcaaggacctacacttcaagatgtttgatgtgggtggtcagcggtctgagcggaagaagtggatccactgctttgagggcgtcacagccatcatcttctgcgtagccttgagcgcctatgacttggtgctagctgaggacgaggagatgaaccgcatgcatgagagcatgaagctattcgatagcatctgcaacaacaagtggttcacagacacgtccatcatcctcttcctcaacaagaaggacctgtttgaggagaagatcacacacagtcccctgaccatctgcttccctgagtacacaggggccaacaaatatgatgaggcagccagctacatccagagtaagtttgaggacctgaataagcgcaaagacaccaaggagatctacacgcacttcacgtgcgccaccgacaccaagaacgtgcagttcgtgtttgacgccgtcaccgatgtcatcatcaagaacaacctgaaggactgcggcctcttctgaggggcagcggggcctggcgggatgggccaccgccgactttgtaccccccaacccctgaggaagatgggggcaagaagatcacgctccccgcctgttcccccgccgcttttctcctctttcctctctttgttctcagctccccctgtcccctcagctccagacgtaggggaggggttgccacaggcctccctgtttgaagcctgcccttgtctgagatgctggtaatggccatggtacccccttctgggcatctgttctggtttttaaccattgtcttgttctgtgatgaggggaggggggcacatgctgagtctcccaaggctgcgtctggaggggcccctgcttctccagcctggacccccagctttgcccaacaccagcccctgccccagcccaagtccaaatgtttacagggagcctcctgcccagtcccccaaccccagccgctcggaggccccaaaggaaaaagcacaagaagcgtgagacgccaccattcctggaaaccacagtccacctgctcattctcgtagctttttaaaaaaatgaaagtaaaggaaaaaaaaaaaactgcaaatctagaaaactttttagagaaaaactatttaaaactgtcagatcctgaccagcaagcccccccccagccccccttccaagtgactccgtgccttgagtgtgtctgcgtgtttacacccgtccctctgctggccgcccccgtgcgagcggcacccctgccctgccctccacagaattgggttccaagggctgttccagacaactgccaacgtcactgagggccctgccccagcggccctggccccaggctctattaacctaaaatgtagctccctagcgctaacctaggaaccgccgctgcctgctggggggccacgcccctcatgcccttgtcccaggcccggggccttcagcgttgaacacttccttgcttttttcacatgttttatggaattgttcacctggtttgaaataataaaatgtagaaagaaaaaaaat

SEQ ID NO: 226 - DNA, 2505 bp, Homo sapiens
  ref <308>: DATABASE ACCESSION NUMBER: NCBI / NM_001493
  ref <309>: DATABASE ENTRY DATE: 2011-11-26
  ref <313>: RELEVANT RESIDUES IN SEQ ID NO: (1)..(2505)
attcttcctgggccgcagcaccggccgccggcccgccccgcccgccccgccccgcgcctctctagactctcggcgagcagcgtcgcccgcggagccgcgctggtgctgtggcccgggccctggcagccctcccgggaggcgagccggggaggcggtggcccctgccggttgcggcggggcgcgggaagaggcgggactctttgacgcggcggaggggtcgggcgacggccgacgcgccgccatctttggtccagtgcggtggcggcggcggcggtggcggcggcgactgctgcggtgaaggaggaggaggagccgagcgggcgctggcaccgaggcctgaccatggacgaggaatacgatgtgatcgtgctggggaccggtctcaccgaatgcatcctgtcgggcatcatgtctgtgaacgggaagaaggtgctgcacatggaccggaacccctactacgggggcgagagctcctccatcacacccctggaggagctgtataagcgttttcagttgctggaggggccccctgagtcgatgggccgaggccgagactggaatgttgacctgattcccaaattcctcatggctaacgggcagctggtaaagatgctactgtatacagaggtgactcgctacctggacttcaaggtggtggagggcagctttgtctacaaggggggcaagatctacaaagtgccgtccactgagactgaggccttggcttccaatctgatgggcatgtttgagaaacggcgcttccgcaagttcctggtgtttgtggcaaacttcgatgagaatgaccccaagacctttgagggcgttgacccccagactaccagcatgcgtgacgtctaccggaagtttgatctgggccaggatgtcatcgatttcactggccatgccctggcgctctaccgcactgatgactacctggaccagccctgccttgagaccgtcaaccgcatcaagttgtacagtgagtccctggcccggtatggcaagagcccatatttatacccgctctacggcttgggcgagctgccccagggttttgcaagattgagtgccatctatggggggacatatatgctgaacaaacctgtggatgacatcatcatggagaacggcaaggtggtgggcgtgaagtctgagggagaggtggcccgctgcaagcagctgatctgtgaccccagctacatcccggaccgtgtgcggaaggctggccaggttatccgcatcatctgtatccttagccaccccatcaagaacaccaacgacgccaactcctgccaaataatcatcccccagaaccaggtcaacaggaagtcagacatctacgtgtgcatgatctcctatgcacacaacgtggcggcccagggcaagtacatagctattgccagcactactgtggagaccacggaccctgaaaaggaggtggagccggctctggagctgttggagcccattgaccagaagtttgtggctatcagtgacttgtatgagcccattgatgatggttgtgagagccaggtgttctgttcctgctcctacgatgccaccacacactttgagacaacctgcaacgacatcaaagacatctacaaacgcatggctggcacggcctttgactttgagaacatgaagcgcaaacagaacgacgtctttggagaagctgagcagtgattgtggccgcccccagcccctgctgccccagcctgtgtctgttctcctcgagggctccagcatcctctgcttcccccaccacgttcccatcacccacctcattgatccactgaccaaatccttaaccctagcgatggcttgggagatggggggttggatagcatcctctttcttggcccttccttatcctaggaaaagagggttcctctccttgtgtgtgtctcttccccccacccctaattcttctgctctgtttgggaagacgtggaggaaaaggtgacttctgcccccaccgctcttacccccactgtagtggcctttggagatgcccccacctcccccccaccaactctcgcgtgttggagagaaggggccctcccagcacaaagttgcattcctcccccctaatttattctaatttattaactttgacccaccctttctgagcctgcagccttcccgtgtggcctgagggctgtcgagtgagctgccccagcccctcccagcccttgcccagcctgggggagtggggaaggcttgggcatggccccgttggaggttgatttgctgttttgtttcttgtctttgtgttctgtggtacttgctgagagaaaagaaaagtgagccaagcagaaggaggtgggaaaacggacccaaaccccagtgtgccctgccccatgcctttcctttagtggtgggaaacccttatcttgcaaagtgaatgtgtccccttccccaccctctagtgtatttcacagaaaacaaaacctcccaataaaacggttgaaacctgaaaaaaaaaaaaaaaaaaaaaaaaaa

SEQ ID NO: 227 - DNA, 2844 bp, Homo sapiens
  ref <308>: DATABASE ACCESSION NUMBER: NCBI / NM_002048
  ref <309>: DATABASE ENTRY DATE: 2011-11-26
  ref <313>: RELEVANT RESIDUES IN SEQ ID NO: (1)..(2844)
agcagccggcacggggacagccggccgcacaacggatctgcaggcgcggagcaaaatgcacccgccgcgccgcgcggtcctgcagccccgccacggccccgcggcccgcacccccccggggcgacagtgagcctctcccgccaccaccgggggccgagcggagggctctcgggtgggagagcgggaccagatctcgacagctgttcatttccaggaagccaccgcagccagagcgaaaggggaccttctgccaccagcggggcatcagccagcggcgcgcatggatttatgaagacactcatgcaagaagtgggcaggacttggacaaacttttccaccggctccgcgtccgccgctccccgcgcctcgtctcctttcccctcctctcccggcggccgccgctgcccgcgatggtggccgcgctgctgggcggcggcggcgaggcccgcggggggacagtgccgggcgcctggctgtgcctgatggcgctgctgcagctgctgggctcggcgccgcggggatcggggctggcgcacggccgccgcctcatctgctggcaggcgctgctgcagtgccagggggagccggagtgcagctacgcctacaaccagtacgccgaggcgtgcgcgccggtgctggcgcagcacggcgggggcgacgcgcccggggccgccgccgccgctttcccggcctcggccgcctctttctcgtcgcgctggcgctgcccgagtcactgcatctcggccctcattcagctcaaccacacgcgccgcgggcccgccctggaggactgtgactgcgcgcaggacgagaactgcaagtccaccaagcgcgccattgagccgtgcctgccccggacgagcggcggcggcgcgggcggccccggcgcgggcggggtcatgggctgcaccgaggcccggcggcgctgcgaccgcgacagccgctgcaacctggcgctgagccgctacctgacctactgcggcaaagtcttcaacgggctgcgctgcacggacgaatgccgcaccgtcattgaggacatgctggctatgcccaaggcggcgctgctcaacgactgcgtgtgcgacggcctcgagcggcccatctgcgagtcggtcaaggagaacatggcccgcctgtgcttcggcgccgagctgggcaacggccccggcagcagcggctcggacgggggcctggacgactactacgatgaggactacgatgacgagcagcgcaccgggggcgcgggtggtgagcagccgctggacgacgacgacggcgtcccgcacccaccgcgcccgggcagcggcgctgctgcatcgggcggccgcggggacctgccctatgggcctgggcgcaggagcagcggcggcggcggccgcttggcgccccggggcgcctggaccccactcgcctccatcttgctgctgctgcttgggccgctcttttagccctcgcgccccccgccgttggctgcgggagagcccgcgtcccactcccgtgctcgcctcgaccccgcgccgggcacctgtggcttgggacagatagaagggatggttggggatacttcccaaaactttttccaagtcaacttggtgtagccggttccccggccacgactctgggcacttcccctgaagctcctctccggagcttgacttcttggacctcctcccccgccccaattccaagctccagaaactcccaactcgtctgccgtccagaaagctagctgcagtgttcaggacgtccgggaggaagcaagcatgtgggggacagaacagtagtcctggactcgaaagggaaggtgctgaccagtggggccttagcaatttgaagggttgggaaggaggaattatatttgcaaaggggctgtctattagcatatttcctttgagggggcaaaaaaaagtgccagtatcgacttttacagattgtggccagtgaggatattataatcctatgtaaacagaaaagtcccacttaccgattcattctttcactgtttgtatctgcgcccagaattctcagtgacgtgggggtgagggtgggtggcgattgccttagagggaacccctaaattggttttggataagtttgagcccttgaccttaatttcattgctaccactctgatctcttagcacatttcttaggattaagggtccaaaaatgctgatctaaggggttgccatggtgttgaacaatgcaactttttatttaaaaaagctctgcactgccatgtatgaaagtctctttatgatgtttgtttttttgtcatttttgttctttacatcaagaaattttatgtttaaatatgcggagaatgtatattgcctctgctcctatcagggttgctaaaccctggtacatcgtatataaaatgtattaaaactggggtttgttaccagttgctgtactttgtatatagaatttttataaattgtatgcttcagaaataatttatttttaaaaagaaattaaaagttttaaactcacatccatattacacctttcccccctgaaatgtatagaatccatttgtcatcaggaatcaaaacccacagtccattgtgaagtgtgctatatttagaacagtcttaaaatgtacagtgtattttatagaattgaagttaacattcttattttcaagagaatttatggacgttgtagaaatgtacaaatgcatttccaaactgccttaaacgttgtatttttatagacatgttttttaaaaatcctaagtttttaaataactatggatttgtgtattttttttggttatttgttttattaaaacatgtacatcagtaaagagttttaaacaatgaaaaaaaaaaaaaaaaaa

SEQ ID NO: 228 - DNA, 1245 bp, Homo sapiens
  ref <308>: DATABASE ACCESSION NUMBER: NCBI / NM_002032
  ref <309>: DATABASE ENTRY DATE: 2011-12-25
  ref <313>: RELEVANT RESIDUES IN SEQ ID NO: (1)..(1245)
ataagagaccacaagcgacccgcagggccagacgttcttcgccgagagtcgtcggggtttcctgcttcaacagtgcttggacggaacccggcgctcgttccccaccccggccggccgcccatagccagccctccgtcacctcttcaccgcaccctcggactgccccaaggcccccgccgccgctccagcgccgcgcagccaccgccgccgccgccgcctctccttagtcgccgccatgacgaccgcgtccacctcgcaggtgcgccagaactaccaccaggactcagaggccgccatcaaccgccagatcaacctggagctctacgcctcctacgtttacctgtccatgtcttactactttgaccgcgatgatgtggctttgaagaactttgccaaatactttcttcaccaatctcatgaggagagggaacatgctgagaaactgatgaagctgcagaaccaacgaggtggccgaatcttccttcaggatatcaagaaaccagactgtgatgactgggagagcgggctgaatgcaatggagtgtgcattacatttggaaaaaaatgtgaatcagtcactactggaactgcacaaactggccactgacaaaaatgacccccatttgtgtgacttcattgagacacattacctgaatgagcaggtgaaagccatcaaagaattgggtgaccacgtgaccaacttgcgcaagatgggagcgcccgaatctggcttggcggaatatctctttgacaagcacaccctgggagacagtgataatgaaagctaagcctcgggctaatttccccatagccgtggggtgacttccctggtcaccaaggcagtgcatgcatgttggggtttcctttaccttttctataagttgtaccaaaacatccacttaagttctttgatttgtaccattccttcaaataaagaaatttggtacccaggtgttgtctttgaggtcttgggatgaatcagaaatctatccaggctatcttccagattccttaagtgccgttgttcagttctaatcacactaatcaaaaagaaacgagtatttgtatttattaaactcattagtttgggcagtatactaaggtgtggctgtcttggattcagatagaactaagggttcccgactctgaatccagagtctgagttaaatgtttccaatggttcagtctagctttcacagtttttatgaataaaaggcattaaaggctgaaaaaaaaaaaaaaaaaa

SEQ ID NO: 229 - DNA, 3911 bp, Homo sapiens
  ref <308>: DATABASE ACCESSION NUMBER: NCBI / NM_001418
  ref <309>: DATABASE ENTRY DATE: 2011-12-04
  ref <313>: RELEVANT RESIDUES IN SEQ ID NO: (1)..(3911)
gcagacggcaaccgggccgctgattgggcggcgaaggagccattcggggagactctggtgggttcggctgccccaagagtgataagttcggcttcagacacgccttagcgccagcagtgagtcggagctctatggaggtggcagcgggtaccgagtggcggctgcagcagcgactcctctgagctgagtttgaggccgtccccgactccttcctcccccttccctcccccttttttttgttttccgttcccctttcccctcccttccctatccccgacgaccggatcctgaggaggcagctgcggtggcagctgctgagttctcggtgaaggtatttcatttctcctgtcccctcccctccccaccccatctattaatattattcttttgaagattcttcgttgtcaagccgccaaagtggagagtgcgattgcagaagggggtgcttctcgtttcagtgcttcttcgggcggaggaggaagtaggggtgcacctcagcactatcccaagactgctggcaacagcgagttcctggggaaaaccccagggcaaaacgctcagaaatggattcctgcacgaagcactagacgagatgacaactccgcagcaaacaactccgcaaacgaaaaagaacgacatgatgcaatcttcaggaaagtaagaggcatactaaataagcttactcctgaaaagtttgacaagctatgccttgagctcctcaatgtgggtgtagagtctaaactcatccttaaaggggtcatactgctgattgtggacaaagccctagaagagccaaagtatagctcactgtatgctcagctatgtctgcgattggcagaagatgcaccaaactttgatggcccagcagcagagggtcaaccaggacagaagcaaagcaccacattcagacgcctcctaatttccaaattacaagatgaatttgaaaaccgaactagaaatgttgatgtctatgataagcgtgaaaatcccctcctccccgaggaggaggaacagagagccattgctaagatcaagatgttgggaaacatcaaattcattggagagcttggcaagcttgatcttattcacgaatctatccttcataagtgcatcaaaacacttttggaaaagaagaagagagtccaactcaaagatatgggagaggatttggagtgcctctgtcagataatgaggacagtgggacctagattagaccatgaacgagccaagtccttaatggatcagtactttgcccgaatgtgctccttgatgttaagtaaggaattgccagcaaggattcgtttcctgctgcaggataccgtagagttgcgagaacaccattgggttcctcgcaaggcttttcttgacaatggaccaaagacgatcaatcaaattcgtcaagatgcagtaaaagatctaggggtgtttattcctgctcctatggctcaagggatgagaagtgacttctttctggagggaccgttcatgccacccaggatgaaaatggatagggacccacttggaggacttgctgatatgtttggacaaatgccaggtagcggaattggtactggtccaggagttatccaggatagattttcacccaccatgggacgtcatcgttcaaatcaactcttcaatggccatgggggacacatcatgcctcccacacaatcgcagtttggagagatgggaggcaagtttatgaaaagccaggggctaagccagctctaccataaccagagtcagggactcttatcccagctgcaaggacagtcgaaggatatgccacctcggttttctaagaaaggacagcttaatgcagatgagattagcctgaggcctgctcagtcgttcctaatgaataaaaatcaagtgccaaagcttcagccccagataactatgattcctcctagtgcacaaccaccacgcactcaaacaccacctctgggacagacacctcagcttggtctcaaaactaatccaccgcttatccaggaaaagcctgccaagaccagcaaaaagccaccaccgtcaaaggaagaactccttaaactaactgaaactgttgtgactgaatatctaaatagtggaaatgcaaatgaggctgtcaatggtgtaagagaaatgagggctcctaaacactttcttcctgagatgttaagcaaagtaatcatcctgtcactagatagaagcgatgaagataaagaaaaagcaagttctttgatcagtttactcaaacaggaagggatagccacaagtgacaacttcatgcaggctttcctgaatgtattggaccagtgtcccaaactggaggttgacatccctttggtgaaatcctatttagcacagtttgcagctcgtgccatcatttcagagctggtgagcatttcagaactagctcaaccactagaaagtggcacccattttcctctcttcctactttgtcttcagcagttagctaaattacaagatcgagaatggttaacagaactttttcaacaaagcaaggtcaatatgcagaaaatgctcccagaaattgatcagaataaggaccgcatgttggagattttggaaggaaagggactgagtttcttattcccactcctcaaattggagaaggaactgttgaagcaaataaagttggatccatcccctcaaaccatatataaatggattaaagataacatctctcccaaacttcatgtagataaaggatttgtgaacatcttaatgactagcttcttacagtacatttctagtgaagtaaacccccccagcgatgaaacagattcatcctctgctccttccaaagaacagttagagcaggaaaaacaactactactatctttcaagccagtaatgcagaaatttcttcatgatcacgttgatctacaagtcagtgccctgtatgctctccaggtgcactgctataacagcaacttcccaaaaggcatgttacttcgcttttttgtgcacttctatgacatggaaattattgaagaagaagctttcttggcttggaaagaagatataacccaagagtttccgggaaaaggcaaggctttgttccaggtgaatcagtggctaacctggttagaaactgctgaagaagaagaatcagaggaagaagctgactaaagaaccagccaaagccttaaattgtgcaaaacatactgttgctatgatgtaactgcatttgacctaaccactgcgaaaattcattccgctgtaatgttttcacaatatttaaagcagaagcacgtcagttaggatttccttctgcataaggtttttttgtagtgtaatgtcttaatcatagtctaccatcaaatattttaggagtatctttaatgtttagatagtatattagcagcatgcaataattacatcataagttctcaagcagaggcagtctattgcaaggaccttctttgctgccagttatcataggctgttttaagttagaaaactgaatagcaacactgaatactgtagaaatgcactttgctcagtaatacttgagttgttgcaatatttgattatccatttggttgttacagaaaaattcttaactgtaattgatggttgttgccgtaatagtatattgcctgtatttctacctctagtaatgggctttatgtgctagattttaatatccttgagcctgggcaagtgcacaagtctttttaaaagaaacatggtttacttgcacaaaactgatcagttttgagagatcgttaatgcccttgaagtggtttttgtgggtgtgaaacaaatggtgagaatttgaattggtccctcctattatagtattgaaattaagtctacttaatttatcaagtcatgttcatgccctgattttatatacttgtatctatcaataaacattgtgatacttgatgtagtga

SEQ ID NO: 230 - DNA, 2629 bp, Homo sapiens
  ref <308>: DATABASE ACCESSION NUMBER: NCBI / NM_001350
  ref <309>: DATABASE ENTRY DATE: 2011-12-13
  ref <313>: RELEVANT RESIDUES IN SEQ ID NO: (1)..(2629)
acgacaatatggcggcgcttagttgcatgaaggcggaaactctgtgacttccggtccgtagtggggcctgcggtgggagtgggaaggaaggcggagggaaccatgcgaggttctgagaattgcggcgagggtcgcctcgagagacggtttctgaggaattctgaaatccccaccacttcctccctccgggggatttgatcccctatggccaccgctaacagcatcatcgtgctggatgatgatgacgaagatgaagcagctgctcagccagggccctcccacccactccccaatgcggcctcacctggggcagaagcccctagctcctctgagcctcatggggccagaggaagcagtagttcgggcggcaagaaatgctacaagctggagaatgagaagctgttcgaagagttccttgaactttgtaagatgcagacagcagaccaccctgaggtggtcccattcctctataaccggcagcaacgtgcccactctctgtttttggcctcggcggagttctgcaacatcctctctagggtcctgtctcgggcccggagccggccagccaagctctatgtctacatcaatgagctctgcactgttctcaaggcccactcagccaaaaagaagctgaacttggcccctgccgccaccacctccaatgagccctctgggaataaccctcccacacacctctccttggaccccacaaatgctgaaaacactgcctctcagtctccaaggacccgtggttcccggcggcagatccagcgtttggagcagctgctggcgctctatgtggcagagatccggcggctgcaggaaaaggagttggatctctcagaattggatgacccagactccgcatacctgcaggaggcacggttgaagcgtaagctgatccgcctctttgggcgactatgtgagctgaaagactgctcttcactgaccggccgtgtcatagagcagcgcatcccctaccgtggcacccgctacccagaggttaacaggcgcattgagcggctcatcaacaagccagggcctgataccttccctgactatggggatgtgcttcgggctgtagagaaggcagctgcccgacacagccttggcctcccccgacagcagctccagctcatggctcaggatgccttccgagatgtgggcatcaggttacaggagcgacgtcacctcgatctcatctacaactttggctgccacctcacagatgactataggccaggcgttgaccctgcactatcagatcctgtgttggcccggcgccttcgggaaaaccggagtttggccatgagtcggctggatgaggtcatctccaaatatgcaatgttgcaagacaaaagtgaggagggcgagagaaaaaagagaagagctcggctccaaggcacctcttcccactctgcagacacccccgaagcctccttggattctggtgagggccctagtggaatggcatcccaggggtgcccttctgcctccagagctgagacagatgacgaagacgatgaggagagtgatgaggaagaggaggaggaggaggaagaagaagaggaggaggccacagattctgaagaggaggaggatctggaacagatgcaggagggtcaggaggatgatgaagaggaggacgaagaggaagaagcagcagcaggtaaagatggagacaagagccccatgtcctcactacagatctccaatgaaaagaacctggaacctggcaaacagatcagcagatcttcaggggagcagcaaaacaaaggacgcatagtgtcaccatcgttactgtcagaagaacccctggccccctccagcatagatgctgaaagcaatggagaacagcctgaggagctgaccctggaggaagaaagccctgtgtctcagctctttgagctagagattgaagctttgcccctggataccccttcctctgtggagacggacatttcctcttccaggaagcaatcagaggagcccttcaccactgtcttagagaatggagcaggcatggtctcttctacttccttcaatggaggcgtctctcctcacaactggggagattctggtcccccctgcaaaaaatctcggaaggagaagaagcaaacaggatcagggccattaggaaacagctatgtggaaaggcaaaggtcagtgcatgagaagaatgggaaaaagatatgtaccctgcccagcccaccttcccccttggcttccttggccccagttgctgattcctccacgagggtggactctcccagccatggcctggtgaccagctccctctgcatcccttctccagcccggctgtcccaaaccccccattcacagcctcctcggcctggtacttgcaagacaagtgtggccacacaatgcgatccagaagagatcatcgtgctctcagactctgattagctgcctccccttctccctgcctccagaatgttctgggataacatttggaggaaggtgggaagcagatgactgaggaagggatggactaagctaatccccttttggtggtgtttctttaaaaaaaaaaaaaagcttaagttttacacagaaacattaataaacaataaagttcttttcttactgtaaaaaaaaaaaaaaaaaa

SEQ ID NO: 231 - DNA, 5664 bp, Homo sapiens
  ref <308>: DATABASE ACCESSION NUMBER: NCBI / NM_001843
  ref <309>: DATABASE ENTRY DATE: 2012-01-01
  ref <313>: RELEVANT RESIDUES IN SEQ ID NO: (1)..(5664)
cttctgctgtcaagtagccagggtgggctccgccgaggcgaggaggggcgccggtggggagatgcgctcccaggtgtttgcagcggaagtgggaaacctgtagggtatggtccagctgtgccgcaccgaggcgagcaggagcagggaacaggtgtttaaaattatccaactgccatagagctaaattcttttttggaaaattgaaccgaacttctactgaatacaagatgaaaatgtggttgctggtcagtcatcttgtgataatatctattactacctgtttagcagagtttacatggtatagaagatatggtcatggagtttctgaggaagacaaaggatttggaccaatttttgaagagcagccaatcaataccatttatccagaggaatcactggaaggaaaagtctcactcaactgtagggcacgagccagccctttcccggtttacaaatggagaatgaataatggggacgttgatctcacaagtgatcgatacagtatggtaggaggaaaccttgttatcaacaaccctgacaaacagaaagatgctggaatatactactgtttagcatctaataactacgggatggtcagaagcactgaagcaaccctgagctttggatatcttgatcctttcccacctgaggaacgtcctgaggtcagagtaaaagaagggaaaggaatggtgcttctctgtgaccccccataccattttccagatgatcttagctatcgctggcttctaaatgaatttcctgtatttatcacaatggataaacggcgatttgtgtctcagacaaatggcaatctctacattgcaaatgttgaggcttccgacaaaggcaattattcctgctttgtttccagtccttctattacaaagagcgtgttcagcaaattcatcccactcattccaatacctgaacgaacaacaaaaccatatcctgctgatattgtagttcagttcaaggatgtatatgcattgatgggccaaaatgtgaccttagaatgttttgcacttggaaatcctgttccggatatccgatggcggaaggttctagaaccaatgccaagcactgctgagattagcacctctggggctgttcttaagatcttcaatattcagctagaagatgaaggcatctatgaatgtgaggctgagaacattagaggaaaggataaacatcaagcaagaatttatgttcaagcattccctgagtgggtagaacacatcaatgacacagaggtggacataggcagtgatctctactggccttgtgtggccacaggaaagcccatccctacaatccgatggttgaaaaatggatatgcgtatcataaaggggaattaagactgtatgatgtgacttttgaaaatgccggaatgtatcagtgcatagctgaaaacacatatggagccatttatgcaaatgctgagttgaagatcttggcgttggctccaacttttgaaatgaatcctatgaagaaaaagatcctggctgctaaaggtggaagggtgataattgaatgcaaacctaaagctgcaccgaaaccaaagttttcatggagtaaagggacagagtggcttgtcaatagcagcagaatactcatttgggaagatggtagcttggaaatcaacaacattacaaggaatgatggaggtatctatacatgctttgcagaaaataacagagggaaagctaatagcactggaacccttgttatcacagatcctacgcgaattatattggccccaattaatgccgatatcacagttggagaaaacgccaccatgcagtgtgctgcgtcctttgatcctgccttggatctcacatttgtttggtccttcaatggctatgtgatcgattttaacaaagagaatattcactaccagaggaattttatgctggattccaatggggaattactaatccgaaatgcgcagctgaaacatgctggaagatacacatgcactgcccagacaattgtggacaattcttcagcttcagctgaccttgtagtgagaggccctccaggccctccaggtggtctgagaatagaagacattagagccacttctgtggcacttacttggagccgtggttcagacaatcatagtcctatttctaaatacactatccagaccaagactattctttcagatgactggaaagatgcaaagacagatcccccaattattgaaggaaatatggaggcagcaagagcagtggacttaatcccatggatggagtatgaattccgcgtggtagcaaccaatacactgggtagaggagagcccagtataccatctaacagaattaaaacagacggtgctgcaccaaatgtggctccttcagatgtaggaggtggaggtggaagaaacagagagctgaccataacatgggcgcctttgtcaagagaataccactatggcaacaattttggttacatagtggcatttaagccatttgatggagaagaatggaaaaaagtcacagttactaatcctgatactggccgatatgtccataaagatgaaaccatgagcccttccactgcatttcaagttaaagtcaaggccttcaacaacaaaggagatggaccttacagcctagtagcagtcattaattcagcacaagacgctcccagtgaagccccaacagaagtaggtgtaaaagtcttatcatcttctgagatatctgttcattgggaacatgttttagaaaaaatagtggaaagctatcagattcggtattgggctgcccatgacaaagaagaagctgcaaacagagttcaagtcaccagccaagagtactcggccaggctcgagaaccttctgccagacacccagtattttatagaagtcggggcctgcaatagtgcagggtgtggacctccaagtgacatgattgaggctttcaccaagaaagcacctcctagccagcctccaaggatcatcagttcagtaaggtctggttcacgctatataatcacctgggatcatgtcgttgcactatcaaatgaatctacagtgacgggatataaggtactctacagacctgatggccagcatgatggcaagctgtattcaactcacaaacactccatagaagtcccaatccccagagatggagaatacgttgtggaggttcgcgcgcacagtgatggaggagatggagtggtgtctcaagtcaaaatttcaggtgcacccaccctatccccaagtcttctcggcttactgctgcctgcctttggcatccttgtctacttggaattctgaatgtgttgtgacagctgctgttcccatcccagctcagaagacacccttcaaccctgggatgaccacaattccttccaatttctgcggctccatcctaagccaaataaattatactttaacaaactattcaactgatttacaacacacatgatgactgaggcattcgggaaccccttcatccaaaagaataaacttttaaatggatataaatgatttttaactcgttccaatatgccttataaaccacttaacctgattctgtgacagttgcatgatttaacccaatgggacaagttacagtgttcaattcaatactataggctgtagagtgaaagtcaaatcaccatatacaggtgctttaaatttaataacaagttgtgaaatataatagagattgaaatgttggttgtatgtggtaaatgtaagagtaatacagtctcttgtactttcctcactgttttgggtactgcatattattgaatggcccctatcattcatgacatcttgagttttcttgaaaagacaatagagtgtaacaaatattttgtcagaaatcccattatcaaatcatgagttgaaagattttgactattgaaaaccaaattctagaacttactatcagtattcttattttcaaaggaaataattttctaaatatttgattttcagaatcagttttttaatagtaaagttaacataccatatagatttttttttacttttatattctactctgaagttattttatgcttttcttatcaatttcaaatctcaaaaatcacagctcttatctagagtatcataatattgctatatttgttcatatgtggagtgacaaattttgaaaagtagagtgcttccttttttattgagatgtgacagtctttacatggttaggaataagtgacagttaagtgaatatcacaattactagtatgttggtttttctgcttcattcctaagtattacgtttctttattgcagatgtcagatcaaaaagtcacctgtaggttgaaaaagctaccgtattccattttgtaaaaataacaataataataataataataattagttttaagctcatttcccacttcaatgcaatactgaaaactggctaaaaataccaaatcaatatactgctaatggtactttgaagagtatgcaaaactggaaggccaggaggaggcaaataatatgtctttccgatggtgtctcccaagtgttggtgctttgggtttttataagttgtgaaaaggaagatgcacatttcttcattctccatggtgtgcatggaaatgtgtttgagtgtggatgtaaaagaaatcgagtaataaagaattagctggcttgtgaaatagtgcagtgttggatgcttcaagaggtataatcctattttattagcacaaacttgctagctaattagagtttatctttttagaaaggacaccgtataggttcgtaaaaaatatttacaggaagcaaaatagatctattactactttaccgactttaccccctttctttaatttgtataatttttgtactatatatcgatgtgtaaatgtttagagtcttcattatgaaaatatcaataaatatttcattagtttacatttaactctggtataaaatgaaacttttaaaaataagtgaaatggatgatttcccagtggaagtatgtcaacagtcttaagatcattgccagatttcataaaatatttaagtatttgaaaaagaaacaaaatgtcttcatactttagggaaacgaataccctgtataccttctgtacaaatgtttgtgttttcattgttacactttggggttttacttttgcaatgtgacccatgttgggcatttttatataatcaacaactaaatcttttgccaaatgcatgcttgccttttattttctaatatatgataataacgagcaaaactggttagattttgcatgaaatggttctgaaaggtaagaggaaaacagactttggaggttgtttagttttgaatttctgacagagataaagtagtttaaaatctctcgtacactgataactcaagcttttcattttctcatacagttgtacagatttaactgggaccatcagttttaaactgttgtcaagctaactaataatcatctgctttaagacgcaagattctgaattaaactttatataggtatagatacatctgttgtttctttgtatttcaggaaaggtgatagtagttttatttgatactgataaatattgaattgattttttagttattttttatcattttttcaatggagtagtataggactgtgctttgtcctttttatgaatgaaaaaattagtataaagtaataaatgtcttatgttacccaagaaaaaa

SEQ ID NO: 232 - DNA, 2024 bp, Homo sapiens
  ref <308>: DATABASE ACCESSION NUMBER: NCBI / NM_001728
  ref <309>: DATABASE ENTRY DATE: 2011-12-18
  ref <313>: RELEVANT RESIDUES IN SEQ ID NO: (1)..(2024)
gtgcgcgcgcccggtccgcgcctccgccgctttttatagcggccgcgggcggcggcggcagcggttggaggttgtaggaccggcgaggaataggaatcatggcggctgcgctgttcgtgctgctgggattcgcgctgctgggcacccacggagcctccggggctgccggcttcgtccaggcgccgctgtcccagcagaggtgggtggggggcagtgtggagctgcactgcgaggccgtgggcagcccggtgcccgagatccagtggtggtttgaagggcagggtcccaacgacacctgctcccagctctgggacggcgcccggctggaccgcgtccacatccacgccacctaccaccagcacgcggccagcaccatctccatcgacacgctcgtggaggaggacacgggcacttacgagtgccgggccagcaacgacccggatcgcaaccacctgacccgggcgcccagggtcaagtgggtccgcgcccaggcagtcgtgctagtcctggaacccggcacagtcttcactaccgtagaagaccttggctccaagatactcctcacctgctccttgaatgacagcgccacagaggtcacagggcaccgctggctgaaggggggcgtggtgctgaaggaggacgcgctgcccggccagaaaacggagttcaaggtggactccgacgaccagtggggagagtactcctgcgtcttcctccccgagcccatgggcacggccaacatccagctccacgggcctcccagagtgaaggctgtgaagtcgtcagaacacatcaacgagggggagacggccatgctggtctgcaagtcagagtccgtgccacctgtcactgactgggcctggtacaagatcactgactctgaggacaaggccctcatgaacggctccgagagcaggttcttcgtgagttcctcgcagggccggtcagagctacacattgagaacctgaacatggaggccgaccccggccagtaccggtgcaacggcaccagctccaagggctccgaccaggccatcatcacgctccgcgtgcgcagccacctggccgccctctggcccttcctgggcatcgtggctgaggtgctggtgctggtcaccatcatcttcatctacgagaagcgccggaagcccgaggacgtcctggatgatgacgacgccggctctgcacccctgaagagcagcgggcagcaccagaatgacaaaggcaagaacgtccgccagaggaactcttcctgaggcaggtggcccgaggacgctccctgctccacgtctgcgccgccgccggagtccactcccagtgcttgcaagattccaagttctcacctcttaaagaaaacccaccccgtagattcccatcatacacttccttcttttttaaaaaagttgggttttctccattcaggattctgttccttaggtttttttccttctgaagtgtttcacgagagcccgggagctgctgccctgcggccccgtctgtggctttcagcctctgggtctgagtcatggccgggtgggcggcacagccttctccactggccggagtcagtgccaggtccttgccctttgtggaaagtcacaggtcacacgaggggccccgtgtcctgcctgtctgaagccaatgctgtctggttgcgccatttttgtgcttttatgtttaattttatgagggccacgggtctgtgttcgactcagcctcagggacgactctgacctcttggccacagaggactcacttgcccacaccgagggcgaccccgtcacagcctcaagtcactcccaagccccctccttgtctgtgcatccgggggcagctctggagggggtttgctggggaactggcgccatcgccgggactccagaaccgcagaagcctccccagctcacccctggaggacggccggctctctatagcaccagggctcacgtgggaacccccctcccacccaccgccacaataaagatcgcccccacctccaccctcaaaaaaaaaaaaaaaaaaaa

SEQ ID NO: 233 - DNA, 993 bp, Homo sapiens
  ref <308>: DATABASE ACCESSION NUMBER: NCBI / NM_001667
  ref <309>: DATABASE ENTRY DATE: 2011-12-04
  ref <313>: RELEVANT RESIDUES IN SEQ ID NO: (1)..(933)
gactatgccgtcggcgagcgtgatagccaacaggaaccgggagcggggtcccgggactgggaagaaacggcggccgggagggggctccggggaccatggggctcctgaccattctgaagaagatgaagcagaaagagcgggagctgcgactgctcatgcttggcctggacaatgctggaaagacaaccatcctgaagaagttcaatggggaggacatcgacaccatctccccaacgctgggcttcaacatcaagaccctggagcaccgaggattcaagctgaacatctgggatgtgggtggccagaagtccctgcggtcctactggcggaactactttgagagcaccgatggcctcatctgggtagtggacagcgcagaccgccagcgcatgcaggactgccagcgggagctccagagcctgctggtggaggagcgcctggccggagcaaccctcctcatctttgctaataagcaggacctgcctggagcactgtcctctaacgccatccgcgaggtcctggagctggactccatccgcagccaccactggtgcatccagggctgcagcgccgtcaccggggagaacctgctgccgggcatcgactggctcctggatgacatttccagccgcattttcacagctgactgaaccactccagatgccccccacctagcagtccaggtccctcaaccttcaccaaacactacccatggggggttgggagtcagccggccaaactaacactccccctcctccaccccagcctgctgctgctactgctgcccgctgctgctctgtggccacccggctcccatggcgggagggctgtgccctggctgtctctctggctcctgacctggcctttggctaccataccaagaagagagggctgggcggggaggagctgctactgctgctaccgaggctgtgggcctcatccttcactcagttgtgaaataaaccgctccttgccccgataaaaaaaaaaaaa

SEQ ID NO: 234 - DNA, 3556 bp, Homo sapiens
  ref <308>: DATABASE ACCESSION NUMBER: NCBI / NM_001659
  ref <309>: DATABASE ENTRY DATE: 2011-11-26
  ref <313>: RELEVANT RESIDUES IN SEQ ID NO: (1)..(3556)
tcgcggcttccggtgctaggtggagggaaggaaggagggagccggggagtgggccagggcagcagccgggctgaagtcggcttggggagccagagggagcggagcggaacctgcggggcagaggcggcggccgcagcggcgcagctgatagcaggaacaggatcaagtcttccataccagggaccaggccaaaaccagactgccactgcccctacttgggccccactgtccccagaaagcagctgctgtgatcatgggcaatatctttggaaaccttctcaagagcctgattgggaagaaggagatgcgcatcctgatggtgggcctggatgccgcaggaaagaccaccatcctatacaagctgaaactgggggagatcgtcaccaccatccctaccattgggttcaatgtggagacagtggagtataagaacatcagctttacagtgtgggatgtgggtggccaggacaagattcgacccctctggagacactacttccagaacacccaagggttgatatttgtggtcgacagcaatgatcgggagcgagtaaatgaggcccgggaagagctgatgagaatgctggcggaggacgagctccgggatgctgtactccttgtctttgcaaacaaacaggatctgcctaatgctatgaacgctgctgagatcacagacaagctgggcctgcattcccttcgtcaccgtaactggtacattcaggccacctgtgccaccagcggggacgggctgtacgaaggcctggactggctggccaatcagctcaaaaacaagaagtgaaagccagacagccctaacaaagcaccccacccacccctgacatacctactgtcaccctgccccagtcctaccccttcctctccatgcaagtgtggccagggccctgggtatcatgtccacatgcccagcaagagccttgcctcccctgcctcccctcctttttcctgtccacctatatgaccaatccctaattgctgtcctgatgatgagtcattccaatttactggatttaaaacaaaaagttgttacggtttcatggggtggcccctctctctctcaccctctgggtttcgggaggtcgagtggggtattctctttgtttggcagtggttgctgtcctcttggcatctgagtcctttccctgtccccacaagcccttctactccctgtttgcctttcctttgccaccctctccctgttttacatggaaattgcacgggcctctctgtgtttgcgtgcatgtgtgcgcctgtatatacatgtatagagagatatatttgtgggggccggggggagcggggagggggtggagtgaagctcagggcttgcagccaggacactgcccactggagcctgtcatctgccccttccgtgttggtgagattaagggaagaaggtgggagggcattagtcaagccggactgccccagtctttgactggttaccctcctctctgcaggtaggtttttctggatgataggacagatgatggattcttcaccaccattttccttgtactcttctctccacccttcttagggctggaggatggcatttatctctagatgactgttcccaaggagatgccactctgctctgccttactgttgggaaggagagaggaacccactcactcttatcagcttagagtgttcaactgatccttccccaccatcttcagatctgttcctctggagcttgactggggggtggggatggcaagtccatggtgtgtgttagggacccagggcattgggggaagggaggcgaaggcctgaggttttccatcttcattctcttttgttattaggagaaggtgaggcatgggccaatcccattcctgccttccagtgccccaccacccttctgatcttaggggttggatgggtcatctgtccttggtcagaattttctcaccctagtactcctactggcctgaccagggctgactgggtattctaatgaggagctgggaagtggggtgacatagctgaccttagtatcaacccccctcttctccaactcttgttttctagtccaggatatgctaaaggacgaagattttctattgtttccaggccctcagaccatccttgctgtcccttcaccctccatgcccctgccatcctcactcacttctcataaatggatctgggggttagagtggaggaaataaaatcctgaagtggttgtcagtgcttgtgggatgcagtggtcttcaggattctccccgcattattatgtagttgttcagaagctgttgctactgcgtctctctgtctgcagggggcacttgttcctgaggtcctcgcctgggtcctgacttctgtagtttctgtgaagacgtggctgtcctgtgggctcctgtgtgtgctggctgcgccctgagctccgagacagctgcccataacctgctaaggtcagggcccagggccccccacagcatggctgagggaccccttcccagtagggctgtcccaagccccactccatggggccaggtttcctggccacttttgttgatagcagatggatcaatattagtaaccccatccaagattgaactgtgaaagagaggttccaggggtatctccctcagtgccagttacttagtgatgtgttacccaggatgcagcaggtgtgtgcaggtatcttgctctctaggcctgtgtgtgtgtgtgagtgtgtgtgtatatgggtgtgggtgtgtttgtgtgtggtggttgtggggggggtgttggaggttctatttcatttaaaaatgtattcatttccctggccccacagatgcttccctccatactttttatttgctctgtttcctcagatttattttgtcttgccccattgcctctccttccttgaactctttccttttcaatctcaactcattcactgctgttgctcatttgcccttttccatgtattttttcctacttaggattttccactctatctttgtggttcatgaggactttgcctcttctcctgcctcattccctgactttctctagttagatgtcagtcctaaataggttttcctcacttcaggcctcacccctcaccttgtttttttgggggctccagggaccaatctggggctggaaatgttaggaggttgccttggtgctgccccagatctgtccagcagggggcagtaagtgatcttggtagtatccctggctgctaagcccttggcaggggtggtcctttctacattcccattcacttaacagctcttttgggattgggtgtttcattccatttctgcccactccctctcctctcctctctggtaggtttaattttatgctttccctgattccagctttctgcttcctgaggactcccgctccccccaccccaaagtttgtctgtggtgttatagtggtaactgcagttcctcctctggaatgtagactgtatatgtttaataactcaccttctctatccttgctcaaaatgtgggataacgcgatgactgtgaccctggttggaaattaaacttgttttatgcaaaaaaaaaaaaaaaaaaaa

SEQ ID NO: 235 - DNA, 733 bp, Homo sapiens
  ref <308>: DATABASE ACCESSION NUMBER: NCBI / NM_003746
  ref <309>: DATABASE ENTRY DATE: 2011-12-25
  ref <313>: RELEVANT RESIDUES IN SEQ ID NO: (1)..(733)
ggcgggagcagggcggggcctgagcactaggcggcggcggctggcgtggggctgcttagatgcgccacggtttcggtagcgacggtatctctagccgggcctgagctgtgctagcacctcccccaggagaccgttgcagtcggccagcccccttctccacggtaaccatgtgcgaccgaaaggccgtgatcaaaaatgcggacatgtcggaagagatgcaacaggactcggtggagtgcgctactcaggcgctggagaaatacaacatagagaaggacattgcggctcatatcaagaaggaatttgacaagaagtacaatcccacctggcattgcatcgtggggaggaacttcggtagttatgtgacacatgaaaccaaacacttcatctacttctacctgggccaagtggccattcttctgttcaaatctggttaaaagcatggactgtgccacacacccagtgatccatccaaaaacaaggactgcagcctaaattccaaataccagagactgaaattttcagccttgctaagggaacatctcgatgtttgaacctttgttgtgttttgtacagggcattctctgtactagtttgtcgtggttataaaacaattagcagaatagcctacatttgtatttattttctattccatacttctgcccacgttgttttctctcaaaatccattcctttaaaaaataaatctgatgcagatgtgtaaaaaaaaaaaa

SEQ ID NO: 236 - DNA, 1578 bp, Homo sapiens
  ref <308>: DATABASE ACCESSION NUMBER: NCBI / NM_002127
  ref <309>: DATABASE ENTRY DATE: 2012-01-01
  ref <313>: RELEVANT RESIDUES IN SEQ ID NO: (1)..(1578)
agtgtggtactttgtcttgaggagatgtcctggactcacacggaaacttagggctacggaatgaagttctcactcccattaggtgacaggtttttagagaagccaatcagcgtcgccgcggtcctggttctaaagtcctcgctcacccacccggactcattctccccagacgccaaggatggtggtcatggcgccccgaaccctcttcctgctgctctcgggggccctgaccctgaccgagacctgggcgggctcccactccatgaggtatttcagcgccgccgtgtcccggcccggccgcggggagccccgcttcatcgccatgggctacgtggacgacacgcagttcgtgcggttcgacagcgactcggcgtgtccgaggatggagccgcgggcgccgtgggtggagcaggaggggccggagtattgggaagaggagacacggaacaccaaggcccacgcacagactgacagaatgaacctgcagaccctgcgcggctactacaaccagagcgaggccagttctcacaccctccagtggatgattggctgcgacctggggtccgacggacgcctcctccgcgggtatgaacagtatgcctacgatggcaaggattacctcgccctgaacgaggacctgcgctcctggaccgcagcggacactgcggctcagatctccaagcgcaagtgtgaggcggccaatgtggctgaacaaaggagagcctacctggagggcacgtgcgtggagtggctccacagatacctggagaacgggaaggagatgctgcagcgcgcggacccccccaagacacacgtgacccaccaccctgtctttgactatgaggccaccctgaggtgctgggccctgggcttctaccctgcggagatcatactgacctggcagcgggatggggaggaccagacccaggacgtggagctcgtggagaccaggcctgcaggggatggaaccttccagaagtgggcagctgtggtggtgccttctggagaggagcagagatacacgtgccatgtgcagcatgaggggctgccggagcccctcatgctgagatggaagcagtcttccctgcccaccatccccatcatgggtatcgttgctggcctggttgtccttgcagctgtagtcactggagctgcggtcgctgctgtgctgtggagaaagaagagctcagattgaaaaggagggagctactctcaggctgcaatgtgaaacagctgccctgtgtgggactgagtggcaagtccctttgtgacttcaagaaccctgactcctctttgtgcagagaccagcccacccctgtgcccaccatgaccctcttcctcatgctgaactgcattccttccccaatcacctttcctgttccagaaaaggggctgggatgtctccgtctctgtctcaaatttgtggtccactgagctataacttacttctgtattaaaattagaatctgagtataaatttactttttcaaattatttccaagagagattgatgggttaattaaaggagaagattcctgaaatttgagagacaaaataaatggaagacatgagaacttt

SEQ ID NO: 237 - DNA, 2986 bp, Homo sapiens
  ref <308>: DATABASE ACCESSION NUMBER: NCBI / NM_004712
  ref <309>: DATABASE ENTRY DATE: 2011-11-13
  ref <313>: RELEVANT RESIDUES IN SEQ ID NO: (1)..(2986)
cctcgcggctctagggccggcgcggtgacgtgcgcgtgcgcgcactggagggaaaaggcggaagcggaagtcggggggcgcgccagctcgtagcaggggagcgcccgcggcgtcgggtttgggctggaggtcgccatggggcgaggcagcggcaccttcgagcgtctcctagacaaggcgaccagccagctcctgttggagacagattgggagtccattttgcagatctgcgacctgatccgccaaggggacacacaagcaaaatatgctgtgaattccatcaagaagaaagtcaacgacaagaacccacacgtcgccttgtatgccctggaggtcatggaatctgtggtaaagaactgtggccagacagttcatgatgaggtggccaacaagcagaccatggaggagctgaaggacctgctgaagagacaagtggaggtaaacgtccgtaacaagatcctgtacctgatccaggcctgggcgcatgccttccggaacgagcccaagtacaaggtggtccaggacacctaccagatcatgaaggtggaggggcacgtctttccagaattcaaagagagcgatgccatgtttgctgccgagagagccccagactgggtggacgctgaggaatgccaccgctgcagggtgcagttcggggtgatgacccgtaagcaccactgccgggcgtgtgggcagatattctgtggaaagtgttcttccaagtactccaccatccccaagtttggcatcgagaaggaggtgcgcgtgtgtgagccctgctacgagcagctgaacaggaaagcggagggaaaggccacttccaccactgagctgccccccgagtacctgaccagccccctgtctcagcagtcccagctgccccccaagagggacgagacggccctgcaggaggaggaggagctgcagctggccctggcgctgtcacagtcagaggcggaggagaaggagaggctgagacagaagtccacgtacacttcgtaccccaaggcggagcccatgccctcggcctcctcagcgccccccgccagcagcctgtactcttcacctgtgaactcgtcggcgcctctggctgaggacatcgaccctgagctcgcacggtatctcaaccggaactactgggagaagaagcaggaggaggctcgcaagagccccacgccatctgcgcccgtgcccctgacggagccggctgcacagcctggggaagggcacgcagcccccaccaacgtggtggagaaccccctcccggagacagactctcagcccattcctccctctggtggcccctttagtgagccacagttccacaatggcgagtctgaggagagccacgagcagttcctgaaggcgctgcagaacgccgtcaccaccttcgtgaaccgcatgaagagtaaccacatgcggggccgcagcatcaccaatgactcggccgtgctctcactcttccagtccatcaacggcatgcacccgcagctgctggagctgctcaaccagctggacgagcgcaggctgtactatgaggggctgcaggacaagctggcacagatccgcgatgcccggggggcgctgagtgccctgcgcgaagagcaccgggagaagcttcgccgggcagccgaggaggcagagcgccagcgccagatccagctggcccagaagctggagataatgcggcagaagaagcaggagtacctggaggtgcagaggcagctggccatccagcgcctgcaggagcaggagaaggagcggcagatgcggctggagcagcagaagcagacggtccagatgcgcgcgcagatgcccgccttccccctgccctacgcccagctccaggccatgcccgcagccggaggtgtgctctaccagccctcgggaccagccagcttccccagcaccttcagccctgccggctcggtggagggctccccaatgcacggcgtgtacatgagccagccggcccctgccgctggcccctaccccagcatgcccagcactgcggctgatcccagcatggtgagtgcctacatgtacccagcaggggccactggggcgcaggcggccccccaggcccaggccggacccaccgccagccccgcttactcatcctaccagcctactcccacagcgggctaccagaacgtggcctcccaggccccacagagcctcccggccatctctcagcctccgcagtccagcaccatgggctacatggggagccagtcagtctccatgggctaccagccttacaacatgcagaatctcatgaccaccctcccaagccaggatgcgtctctgccaccccagcagccctacatcgcggggcagcagcccatgtaccagcagatggcaccctctggcggtcccccccagcagcagccccccgtggcccagcaaccgcaggcacaggggccgccggcacagggcagcgaggcccagctcatttcattcgactgacccaggccatgctcacgtccggagtaacactacatacagttcacctgaaacgcctcgtctctaactgccgtcgtcctgcctccctgtcctctactgccggtagtgtcccttctctgcgagtgagggggggccttcaccccaagcccacctcccttgtcctcagcctactgcagtccctgagttagtctctgctttctttccccagggctgggccatggggagggaaggactttctcccaggggaagcccccagccctgtgggtcatggtctgtgagaggtggcaggaatggggaccctcaccccccaagcagcctgtgccctctggccgcactgtgagctggctgtggtgtctgggtgtggcctggggctccctctgcaggggcctctctcggcagccacagccaagggtggaggcttcaggtctccagcttctctgcttctcagctgccatctccagtgccccagaatggtacagcgataataaaatgtatttcagaaagcaaaaaaaaaaaaaaa

SEQ ID NO: 238 - DNA, 1554 bp, Homo sapiens
  ref <308>: DATABASE ACCESSION NUMBER: NCBI / NM_003475
  ref <309>: DATABASE ENTRY DATE: 2011-11-27
  ref <313>: RELEVANT RESIDUES IN SEQ ID NO: (1)..(1554)
ggggagggggcagtgtcctccgagccaggacaggcatgttgttgggactggcggccatggagctgaaggtgtgggtggatggcatccagcgtgtggtctgtggggtctcagagcagaccacctgccaggaagtggtcatcgcactagcccaagcaataggccagactggccgctttgtgcttgtgcagcggcttcgggagaaggagcggcagttgctgccacaagagtgtccagtgggcgcccaggccacctgcggacagtttgccagcgatgtccagtttgtcctgaggcgcacagggcccagcctagctgggaggccctcctcagacagctgtccacccccggaacgctgcctaattcgtgccagcctccctgtaaagccacgggctgcgctgggctgtgagccccgcaaaacactgacccccgagccagcccccagcctctcacgccctgggcctgcggcccctgtgacacccacaccaggctgctgcacagacctgcggggcctggagctcagggtgcagaggaatgctgaggagctgggccatgaggccttctgggagcaagagctgcgccgggagcaggcccgggagcgagagggacaggcacgcctgcaggcactaagtgcggccactgctgagcatgccgcccggctgcaggccctggacgctcaggcccgtgccctggaggctgagctgcagctggcagcggaggcccctgggcccccctcacctatggcatctgccactgagcgcctgcaccaggacctggctgttcaggagcggcagagtgcggaggtgcagggcagcctggctctggtgagccgggccctggaggcagcagagcgagccttgcaggctcaggctcaggagctggaggagctgaaccgagagctccgtcagtgcaacctgcagcagttcatccagcagaccggggctgcgctgccaccgcccccacggcctgacaggggccctcctggcactcagggccctctgcctccagccagagaggagtccctcctgggcgctccctctgagtcccatgctggtgcccagcctaggccccgaggtggcccccatgacgcagaactcctggaggtagcagcagctcctgccccagagtggtgtcctctggcagcccagccccaggctctgtgacagcctagtgagggctgcaagaccatcctgcccggaccacagaaggagagttggcggtcacagagggctcctctgccaggcagtgggaagccctgggtttggcctcaggagctgggggtgcagtgggggactgccctagtccttgccaggtcgccagcaccctggagaagcatggggcgtagccagctcggaacttgccaggccccaaaggccacgactgcctgttggggacaggagatgcatggacagtgtgctcaagctgtgggcatgtgcttgcctgcgggagaggtccttcactgtgtgtacacagcaagagcatgtgtgtgccacttcccctaccccaacgtgaaaacctcaataaactgcccgaagcagcttgaaaaaaaaaaaaaaaaaa

SEQ ID NO: 239 - DNA, 1895 bp, Homo sapiens
  ref <308>: DATABASE ACCESSION NUMBER: NCBI / NM_004046
  ref <309>: DATABASE ENTRY DATE: 2011-11-13
  ref <313>: RELEVANT RESIDUES IN SEQ ID NO: (1)..(1895)
gtcttgaccttctttgcggctcggccattttgtcccagtcagtccggaggctgcggctgcagaagtaccgcctgcggagtaactgcaaagatgctgtccgtgcgcgttgctgcggccgtggtccgcgcccttcctcggcgggccggactggtctccagaaatgctttgggttcatctttcattgctgcaaggaacttccatgcctctaacactcatcttcaaaagactgggactgctgagatgtcctctattcttgaagagcgtattcttggagctgatacctctgttgatcttgaagaaactgggcgtgtcttaagtattggtgatggtattgcccgcgtacatgggctgaggaatgttcaagcagaagaaatggtagagttttcttcaggcttaaagggtatgtccttgaacttggaacctgacaatgttggtgttgtcgtgtttggaaatgataaactaattaaggaaggagatatagtgaagaggacaggagccattgtggacgttccagttggtgaggagctgttgggtcgtgtagttgatgcccttggtaatgctattgatggaaagggtccaattggttccaagacgcgtaggcgagttggtctgaaagcccccggtatcattcctcgaatttcagtgcgggaaccaatgcagactggcattaaggctgtggatagcttggtgccaattggtcgtggtcagcgtgaactgattattggtgaccgacagactgggaaaacctcaattgctattgacacaatcattaaccagaaacgtttcaatgatggatctgatgaaaagaagaagctgtactgtatttatgttgctattggtcaaaagagatccactgttgcccagttggtgaagagacttacagatgcagatgccatgaagtacaccattgtggtgtcggctacggcctcggatgctgccccacttcagtacctggctccttactctggctgttccatgggagagtattttagagacaatggcaaacatgctttgatcatctatgacgacttatccaaacaggctgttgcttaccgtcagatgtctctgttgctccgccgaccccctggtcgtgaggcctatcctggtgatgtgttctacctacactcccggttgctggagagagcagccaaaatgaacgatgcttttggtggtggctccttgactgctttgccagtcatagaaacacaggctggtgatgtgtctgcttacattccaacaaatgtcatttccatcactgacggacagatcttcttggaaacagaattgttctacaaaggtatccgccctgcaattaacgttggtctgtctgtatctcgtgtcggatccgctgcccaaaccagggctatgaagcaggtagcaggtaccatgaagctggaattggctcagtatcgtgaggttgctgcttttgcccagttcggttctgacctcgatgctgccactcaacaacttttgagtcgtggcgtgcgtctaactgagttgctgaagcaaggacagtattctcccatggctattgaagaacaagtggctgttatctatgcgggtgtaaggggatatcttgataaactggagcccagcaagattacaaagtttgagaatgctttcttgtctcatgtcgtcagccagcaccaagccttgttgggcactatcagggctgatggaaagatctcagaacaatcagatgcaaagctgaaagagattgtaacaaatttcttggctggatttgaagcttaaactcctgtggattcacatcaaataccagttcagttttgtcattgttctagtaaattagttccatttgtaaaagggttactctcatactccttatgtacagaaatcacatgaaaaataaaggttccataatgcatagttaaaaa

SEQ ID NO: 240 - DNA, 2670 bp, Homo sapiens
  ref <308>: DATABASE ACCESSION NUMBER: NCBI / NM_001894
  ref <309>: DATABASE ENTRY DATE: 2011-12-07
  ref <313>: RELEVANT RESIDUES IN SEQ ID NO: (1)..(2670)
ggttgggatctgaggggtcctctctgtgcccatcacagtttgagcttcagggaaaagaagaagaggtctttgcccttcgtttttccacgggaggagaatcaagagtgagccatggagctacgtgtggggaacaagtaccgcctgggacggaagatcgggagcgggtccttcggagatatctacctgggtgccaacatcgcctctggtgaggaagtcgccatcaagctggagtgtgtgaagacaaagcacccccagctgcacatcgagagcaagttctacaagatgatgcagggtggcgtggggatcccgtccatcaagtggtgcggagctgagggcgactacaacgtgatggtcatggagctgctggggcctagcctcgaggacctgttcaacttctgttcccgcaaattcagcctcaagacggtgctgctcttggccgaccagatgatcagccgcatcgagtatatccactccaagaacttcatccaccgggacgtcaagcccgacaacttcctcatggggctggggaagaagggcaacctggtctacatcatcgacttcggcctggccaagaagtaccgggacgcccgcacccaccagcacattccctaccgggaaaacaagaacctgaccggcacggcccgctacgcttccatcaacacgcacctgggcattgagcaaagccgtcgagatgacctggagagcctgggctacgtgctcatgtacttcaacctgggctccctgccctggcaggggctcaaagcagccaccaagcgccagaagtatgaacggatcagcgagaagaagatgtcaacgcccatcgaggtcctctgcaaaggctatccctccgaattctcaacatacctcaacttctgccgctccctgcggtttgacgacaagcccgactactcttacctacgtcagctcttccgcaacctcttccaccggcagggcttctcctatgactacgtctttgactggaacatgctgaaattcggtgcagcccggaatcccgaggatgtggaccgggagcggcgagaacacgaacgcgaggagaggatggggcagctacgggggtccgcgacccgagccctgccccctggcccacccacgggggccactgccaaccggctccgcagtgccgccgagcccgtggcttccacgccagcctcccgcatccagccggctggcaatacttctcccagagcgatctcgcgggtcgaccgggagaggaaggtgagtatgaggctgcacaggggtgcgcccgccaacgtctcctcctcagacctcactgggcggcaagaggtctcccggatcccagcctcacagacaagtgtgccatttgaccatctcgggaagtgaggagagcccccattggaccagtgtttgcttagtgtcttcactgtattttctttaaaaaaaaaaaaaaaaaaaaaaaggcaaaaataaaccactcaaaagaacaacaaaaaaacccagcacaaaaccgacgatggagtttgtttctttgatttctttgccaatggcaagaagatgagatgccctcagcactgaggattcttgcccccttgtggtgcccgctgcccccaaccttcaggctgccagatgctcccctgacaacaccaggctacaggagccagacgccagggcctgcccggcctcctgttcctgcccccacccaccacctgcctggagaggaacgggtcgggtccgtgtcggagaagtgacaggtcccagagccaaagccggccctcaagcatcatcagggagtggtgtagtcagttgaaggcagttcccaccgagttttccgagcctcagaatccaggagatacgcacagccccacccactctgagatgacagtggctgacttcccgtgctgggcttttccattgtccccctggcctccaggctcctcctctgcctctccatggagtgggtggggaggtggtgggggccggcgtcccctgcgtgtgtgtgtgtgtgtgtgtgtgtggatgtattgacctgtgtttcccaagacagcaggtgccacggcccgccccgcctgccagcccgaattcccgttctcctgtgtctactaacaaggacatgggggtgggcggtgacctccgcatccctcagagctcagagggtcctcgctgccaccggtccccccctagcccgtcatcagccggtggcagctccatcttccattcctggttttagggcagaatccatggagactgcttccagaaggcatctggctctgagttataaattacttccctggtcctgacagtcacctggggtcccccctctccctggttccacctttctgaggaggagcctggagtcagggctgggttttggattaacccatccttcctagttaacacctttttgtttttattttattttatttttgtttgttttctccgtgtgtgtgttttcctaatttatttacctctgtttcccctttttcctttttttttttaattaaagagcaaagctttttattactttgtaatttaaaaaactgaaaaaaaaaaaactgaagaactttggggggaattttgtacttttttcctgtgtaaatattggacttttttgagctttatcgtggttgttaatttgaagtaataaagtagaaaagataaagtgaaaaaaaaaaaaaaaaaaaaaaaaaaaaa

SEQ ID NO: 241 - DNA, 1497 bp, Homo sapiens
  ref <308>: DATABASE ACCESSION NUMBER: NCBI / NM_003795
  ref <309>: DATABASE ENTRY DATE: 2011-08-13
  ref <313>: RELEVANT RESIDUES IN SEQ ID NO: (1)..(1497)
agtccggccggaacctgtttgcgaccccgagtcccatgacaccgcttctcctcacaccccagtccgcagtgcccctccccagcctcggccgggcctcccgggagccgggcgtggcgttccagctagtgagccgtttctcccctgggctcggaggcggaagcttgaggggcgcggggaggagcttcgcgtgcggggtgaacgcccgctctacgtgctcgttctcttcgcgaccgctgcgcgcgagccccgtgtccccacggcgggcagcagcggcggcggcggcggctgaacgcggagggggcggagggagcccgcggcggcggcagcagctacagcgaaatggcggagaccgtggctgacacccggcggctgatcaccaagccgcagaacctgaatgacgcctacggaccccccagcaacttcctcgagatcgatgtgagcaacccgcaaacggtgggggtcggccggggccgcttcaccacttacgaaatcagggtcaagacaaatcttcctattttcaagctgaaagaatctactgttagaagaagatacagtgactttgaatggctgcgaagtgaattagaaagagagagcaaggtcgtagttcccccgctccctgggaaagcgtttttgcgtcagcttccttttagaggagatgatggaatatttgatgacaattttattgaggaaagaaaacaagggctggagcagtttataaacaaggtcgctggtcatcctctggcacagaacgaacgttgtcttcacatgtttttacaagatgaaataatagataaaagctatactccatctaaaataagacatgcctgaaatttggcaagaaggggcaaaaacgtgactattaatgattgataagcaccagtgaagaagttctaacttttagcatgctgcacagaaactggtataacatgccttcagtatactaacactcatatgctcagttttgttttgttttggcagttgacaagaagttaatttgctttagtaaaaatccctcattccagcctttctatataaatagctctttcttgctgttttaatgtggtgcacactatagcctcacaaacctgttattccagtgtaatctgcagtgtcgtaactaaagttactggcttggtcttatttgcacagtttttgcgtcttgtttgcttcttgcatctgattaactagaatatttctctttcccccttttaatttgtgatgtcacttgaccccatttatgtgtaggagcactacaccattggtttccaatactgcacacataagatacatacttgtgtgcagaaagtatcttcctccaggcttgtaatacccttcacatggaagattaatgagggaaatctttatattctgtataaaaacaaaagcaaatttatatactaaaatcatttgtctaaaaatttaagttgttttcaaataaaaattaaaatgcatttctgatatgcaaaaaaaaaaaaaaaaaaaaaaaaaaaaaaaaaa

SEQ ID NO: 242 - DNA, 2141 bp, Homo sapiens
  ref <308>: DATABASE ACCESSION NUMBER: NCBI / NM_001909
  ref <309>: DATABASE ENTRY DATE: 2012-01-01
  ref <313>: RELEVANT RESIDUES IN SEQ ID NO: (1)..(2141)
gcgcacgccggccgcgcccacgtgaccggtccgggtgcaaacacgcgggtcagctgatccggcccaactgcggcgtcatcccggctataagcgcacggcctcggcgaccctctccgacccggccgccgccgccatgcagccctccagccttctgccgctcgccctctgcctgctggctgcacccgcctccgcgctcgtcaggatcccgctgcacaagttcacgtccatccgccggaccatgtcggaggttgggggctctgtggaggacctgattgccaaaggccccgtctcaaagtactcccaggcggtgccagccgtgaccgaggggcccattcccgaggtgctcaagaactacatggacgcccagtactacggggagattggcatcgggacgcccccccagtgcttcacagtcgtcttcgacacgggctcctccaacctgtgggtcccctccatccactgcaaactgctggacatcgcttgctggatccaccacaagtacaacagcgacaagtccagcacctacgtgaagaatggtacctcgtttgacatccactatggctcgggcagcctctccgggtacctgagccaggacactgtgtcggtgccctgccagtcagcgtcgtcagcctctgccctgggcggtgtcaaagtggagaggcaggtctttggggaggccaccaagcagccaggcatcaccttcatcgcagccaagttcgatggcatcctgggcatggcctacccccgcatctccgtcaacaacgtgctgcccgtcttcgacaacctgatgcagcagaagctggtggaccagaacatcttctccttctacctgagcagggacccagatgcgcagcctgggggtgagctgatgctgggtggcacagactccaagtattacaagggttctctgtcctacctgaatgtcacccgcaaggcctactggcaggtccacctggaccaggtggaggtggccagcgggctgaccctgtgcaaggagggctgtgaggccattgtggacacaggcacttccctcatggtgggcccggtggatgaggtgcgcgagctgcagaaggccatcggggccgtgccgctgattcagggcgagtacatgatcccctgtgagaaggtgtccaccctgcccgcgatcacactgaagctgggaggcaaaggctacaagctgtccccagaggactacacgctcaaggtgtcgcaggccgggaagaccctctgcctgagcggcttcatgggcatggacatcccgccacccagcgggccactctggatcctgggcgacgtcttcatcggccgctactacactgtgtttgaccgtgacaacaacagggtgggcttcgccgaggctgcccgcctctagttcccaaggcgtccgcgcgccagcacagaaacagaggagagtcccagagcaggaggcccctggcccagcggcccctcccacacacacccacacactcgcccgcccactgtcctgggcgccctggaagccggcggcccaagcccgacttgctgttttgttctgtggttttcccctccctgggttcagaaatgctgcctgcctgtctgtctctccatctgtttggtgggggtagagctgatccagagcacagatctgtttcgtgcattggaagaccccacccaagcttggcagccgagctcgtgtatcctggggctcccttcatctccagggagtcccctccccggccctaccagcgcccgctgggctgagcccctaccccacaccaggccgtcctcccgggccctcccttggaaacctgccctgcctgagggcccctctgcccagcttgggcccagctgggctctgccaccctacctgttcagtgtcccgggcccgttgaggatgaggccgctagaggcctgaggatgagctggaaggagtgagaggggacaaaacccaccttgttggagcctgcagggtggtgctgggactgagccagtcccaggggcatgtattggcctggaggtggggttgggattgggggctggtgccagccttcctctgcagctgacctctgttgtcctccccttgggcggctgagagccccagctgacatggaaatacagttgttggcctccggcctcccctctgtaaaaaaaaaaaaaaaaaa

SEQ ID NO: 243 - DNA, 984 bp, Homo sapiens
  ref <308>: DATABASE ACCESSION NUMBER: NCBI / NM_002792
  ref <309>: DATABASE ENTRY DATE: 2011-11-20
  ref <313>: RELEVANT RESIDUES IN SEQ ID NO: (1)..(984)
cggcgccgagggtggggcgcgggcgtagtggcgccgggagtcgcgggtgcgcgcgggccgtgagtgtgcgcttttgagagtcgcggcggaaggagcccggccgccgcccgccggcatgagctacgaccgcgccatcaccgtcttctcgcccgacggccacctcttccaagtggagtacgcgcaggaggccgtcaagaagggctcgaccgcggttggtgttcgaggaagagacattgttgttcttggtgtggagaagaagtcagtggccaaactgcaggatgaaagaacagtgcggaagatctgtgctttggatgacaacgtctgcatggcctttgcaggcctcaccgccgatgcaaggatagtcatcaacagggcccgggtggagtgccagagccaccggctgactgtggaggacccggtcactgtggagtacatcacccgctacatcgccagtctgaagcagcgttatacgcagagcaatgggcgcaggccgtttggcatctctgccctcatcgtgggtttcgactttgatggcactcctaggctctatcagactgacccctcgggcacataccatgcctggaaggccaatgccataggtcggggtgccaagtcagtgcgcgagttcctggagaagaactatactgacgaagccattgaaacagatgatctgaccattaagctggtgatcaaggcactcctggaagtggttcagtcaggtggcaaaaacattgaacttgctgtcatgaggcgagatcaatccctcaagattttaaatcctgaagaaattgagaagtatgttgctgaaattgaaaaagaaaaagaagaaaacgaaaagaagaaacaaaagaaagcatcatgatgaataaaatgtctttgcttgtaatttttaaattcatatcaatcatggatgagtctcgatgtgtaggcctttccattccatttattcacactgagtgtcctacaataaacttccgtattttt

SEQ ID NO: 244 - DNA, 1012 bp, Homo sapiens
  ref <308>: DATABASE ACCESSION NUMBER: NCBI / NM_002799
  ref <309>: DATABASE ENTRY DATE: 2011-11-20
  ref <313>: RELEVANT RESIDUES IN SEQ ID NO: (1)..(1012)
actgctttcttgggaagatggcggctgtgtcggtgtatgctccaccagttggaggcttctcttttgataactgccgcaggaatgccgtcttggaagccgattttgcaaagaggggatacaagcttccaaaggtccggaaaactggcacgaccatcgctggggtggtctataaggatggcatagttcttggagcagatacaagagcaactgaagggatggttgttgctgacaagaactgttcaaaaatacacttcatatctcctaatatttattgttgtggtgctgggacagctgcagacacagacatgacaacccagctcatttcttccaacctggagctccactccctctccactggccgtcttcccagagttgtgacagccaatcggatgctgaagcagatgcttttcaggtatcaaggttacattggtgcagccctagttttagggggagtagatgttactggacctcacctctacagcatctatcctcatggatcaactgataagttgccttatgtcaccatgggttctggctccttggcagcaatggctgtatttgaagataagtttaggccagacatggaggaggaggaagccaagaatctggtgagcgaagccatcgcagctggcatcttcaacgacctgggctccggaagcaacattgacctctgcgtcatcagcaagaacaagctggattttctccgcccatacacagtgcccaacaagaaggggaccaggcttggccggtacaggtgtgagaaagggactactgcagtcctcactgagaaaatcactcctctggagattgaggtgctggaagaaacagtccaaacaatggacacttcctgaatggcatcagtgggtggctggccgcggttctggaaggtggtgagcattgaggcccagtaagacactcatgtggctagtgtttgccgaatgaaactcaactcaataaaaaacaaaaaccaaattgggcagctgaaaaaaaaaaaaaaaaaaaaaaaaaaaaa

SEQ ID NO: 245 - DNA, 1317 bp, Homo sapiens
  ref <308>: DATABASE ACCESSION NUMBER: NCBI / NM_002300
  ref <309>: DATABASE ENTRY DATE: 2011-11-12
  ref <313>: RELEVANT RESIDUES IN SEQ ID NO: (1)..(1317)
cccctcctccctccttgcagagccggcgccggaggagacgcacgcagctgactttgtcttctccgcacgactgttacagaggtctccagagccttctctctcctgtgcaaaatggcaactcttaaggaaaaactcattgcaccagttgcggaagaagaggcaacagttccaaacaataagatcactgtagtgggtgttggacaagttggtatggcgtgtgctatcagcattctgggaaagtctctggctgatgaacttgctcttgtggatgttttggaagataagcttaaaggagaaatgatggatctgcagcatgggagcttatttcttcagacacctaaaattgtggcagataaagattattctgtgaccgccaattctaagattgtagtggtaactgcaggagtccgtcagcaagaaggggagagtcggctcaatctggtgcagagaaatgttaatgtcttcaaattcattattcctcagatcgtcaagtacagtcctgattgcatcataattgtggtttccaacccagtggacattcttacgtatgttacctggaaactaagtggattacccaaacaccgcgtgattggaagtggatgtaatctggattctgctagatttcgctaccttatggctgaaaaacttggcattcatcccagcagctgccatggatggattttgggggaacatggcgactcaagtgtggctgtgtggagtggtgtgaatgtggcaggtgtttctctccaggaattgaatccagaaatgggaactgacaatgatagtgaaaattggaaggaagtgcataagatggtggttgaaagtgcctatgaagtcatcaagctaaaaggatataccaactgggctattggattaagtgtggctgatcttattgaatccatgttgaaaaatctatccaggattcatcccgtgtcaacaatggtaaaggggatgtatggcattgagaatgaagtcttcctgagccttccatgtatcctcaatgcccggggattaaccagcgttatcaaccagaagctaaaggatgatgaggttgctcagctcaagaaaagtgcagataccctgtgggacatccagaaggacctaaaagacctgtgactagtgagctctaggctgtagaaatttaaaaactacaatgtgattaactcgagcctttagttttcatccatgtacatggatcacagtttgctttgatcttcttcaatatgtgaatttgggctcacagaatcaaagcctatgcttggtttaatgcttgcaatctgagctcttgaacaaataaaattaactattgtagtgtgc

SEQ ID NO: 246 - DNA, 4922 bp, Homo sapiens
  ref <308>: DATABASE ACCESSION NUMBER: NCBI / NM_004176
  ref <309>: DATABASE ENTRY DATE: 2011-12-24
  ref <313>: RELEVANT RESIDUES IN SEQ ID NO: (1)..(4922)
agcagagctgcggccgggggaacccagtttccgaggaacttttcgccggcgccgggccgcctctgaggccagggcaggacacgaacgcgcggagcggcggcggcgactgagagccggggccgcggcggcgctccctaggaagggccgtacgaggcggcgggcccggcgggcctcccggaggaggcggctgcgccatggacgagccacccttcagcgaggcggctttggagcaggcgctgggcgagccgtgcgatctggacgcggcgctgctgaccgacatcgaagacatgcttcagcttatcaacaaccaagacagtgacttccctggcctatttgacccaccctatgctgggagtggggcagggggcacagaccctgccagccccgataccagctccccaggcagcttgtctccacctcctgccacattgagctcctctcttgaagccttcctgagcgggccgcaggcagcgccctcacccctgtcccctccccagcctgcacccactccattgaagatgtacccgtccatgcccgctttctcccctgggcctggtatcaaggaagagtcagtgccactgagcatcctgcagacccccaccccacagcccctgccaggggccctcctgccacagagcttcccagccccagccccaccgcagttcagctccacccctgtgttaggctaccccagccctccgggaggcttctctacaggaagccctcccgggaacacccagcagccgctgcctggcctgccactggcttccccgccaggggtcccgcccgtctccttgcacacccaggtccagagtgtggtcccccagcagctactgacagtcacagctgcccccacggcagcccctgtaacgaccactgtgacctcgcagatccagcaggtcccggtcctgctgcagccccacttcatcaaggcagactcgctgcttctgacagccatgaagacagacggagccactgtgaaggcggcaggtctcagtcccctggtctctggcaccactgtgcagacagggcctttgccgaccctggtgagtggcggaaccatcttggcaacagtcccactggtcgtagatgcggagaagctgcctatcaaccggctcgcagctggcagcaaggccccggcctctgcccagagccgtggagagaagcgcacagcccacaacgccattgagaagcgctaccgctcctccatcaatgacaaaatcattgagctcaaggatctggtggtgggcactgaggcaaagctgaataaatctgctgtcttgcgcaaggccatcgactacattcgctttctgcaacacagcaaccagaaactcaagcaggagaacctaagtctgcgcactgctgtccacaaaagcaaatctctgaaggatctggtgtcggcctgtggcagtggagggaacacagacgtgctcatggagggcgtgaagactgaggtggaggacacactgaccccacccccctcggatgctggctcacctttccagagcagccccttgtcccttggcagcaggggcagtggcagcggtggcagtggcagtgactcggagcctgacagcccagtctttgaggacagcaaggcaaagccagagcagcggccgtctctgcacagccggggcatgctggaccgctcccgcctggccctgtgcacgctcgtcttcctctgcctgtcctgcaaccccttggcctccttgctgggggcccgggggcttcccagcccctcagataccaccagcgtctaccatagccctgggcgcaacgtgctgggcaccgagagcagagatggccctggctgggcccagtggctgctgcccccagtggtctggctgctcaatgggctgttggtgctcgtctccttggtgcttctctttgtctacggtgagccagtcacacggccccactcaggccccgccgtgtacttctggaggcatcgcaagcaggctgacctggacctggcccggggagactttgcccaggctgcccagcagctgtggctggccctgcgggcactgggccggcccctgcccacctcccacctggacctggcttgtagcctcctctggaacctcatccgtcacctgctgcagcgtctctgggtgggccgctggctggcaggccgggcagggggcctgcagcaggactgtgctctgcgagtggatgctagcgccagcgcccgagacgcagccctggtctaccataagctgcaccagctgcacaccatggggaagcacacaggcgggcacctcactgccaccaacctggcgctgagtgccctgaacctggcagagtgtgcaggggatgccgtgtctgtggcgacgctggccgagatctatgtggcggctgcattgagagtgaagaccagtctcccacgggccttgcattttctgacacgcttcttcctgagcagtgcccgccaggcctgcctggcacagagtggctcagtgcctcctgccatgcagtggctctgccaccccgtgggccaccgtttcttcgtggatggggactggtccgtgctcagtaccccatgggagagcctgtacagcttggccgggaacccagtggaccccctggcccaggtgactcagctattccgggaacatctcttagagcgagcactgaactgtgtgacccagcccaaccccagccctgggtcagctgatggggacaaggaattctcggatgccctcgggtacctgcagctgctgaacagctgttctgatgctgcgggggctcctgcctacagcttctccatcagttccagcatggccaccaccaccggcgtagacccggtggccaagtggtgggcctctctgacagctgtggtgatccactggctgcggcgggatgaggaggcggctgagcggctgtgcccgctggtggagcacctgccccgggtgctgcaggagtctgagagacccctgcccagggcagctctgcactccttcaaggctgcccgggccctgctgggctgtgccaaggcagagtctggtccagccagcctgaccatctgtgagaaggccagtgggtacctgcaggacagcctggctaccacaccagccagcagctccattgacaaggccgtgcagctgttcctgtgtgacctgcttcttgtggtgcgcaccagcctgtggcggcagcagcagcccccggccccggccccagcagcccagggcaccagcagcaggccccaggcttccgcccttgagctgcgtggcttccaacgggacctgagcagcctgaggcggctggcacagagcttccggcccgccatgcggagggtgttcctacatgaggccacggcccggctgatggcgggggccagccccacacggacacaccagctcctcgaccgcagtctgaggcggcgggcaggccccggtggcaaaggaggcgcggtggcggagctggagccgcggcccacgcggcgggagcacgcggaggccttgctgctggcctcctgctacctgccccccggcttcctgtcggcgcccgggcagcgcgtgggcatgctggctgaggcggcgcgcacactcgagaagcttggcgatcgccggctgctgcacgactgtcagcagatgctcatgcgcctgggcggtgggaccactgtcacttccagctagaccccgtgtccccggcctcagcacccctgtctctagccactttggtcccgtgcagcttctgtcctgcgtcgaagctttgaaggccgaaggcagtgcaagagactctggcctccacagttcgacctgcggctgctgtgtgccttcgcggtggaaggcccgaggggcgcgatcttgaccctaagaccggcggccatgatggtgctgacctctggtggccgatcggggcactgcaggggccgagccattttggggggcccccctccttgctctgcaggcaccttagtggcttttttcctcctgtgtacagggaagagaggggtacatttccctgtgctgacggaagccaacttggctttcccggactgcaagcagggctctgccccagaggcctctctctccgtcgtgggagagagacgtgtacatagtgtaggtcagcgtgcttagcctcctgacctgaggctcctgtgctactttgccttttgcaaactttattttcatagattgagaagttttgtacagagaattaaaaatgaaattatttataatctgggttttgtgtcttcagctgatggatgtgctgactagtgagagtgcttgggccctcccccagcacctagggaaaggcttcccctccccctccggccacaaggtacacaacttttaacttagctcttcccgatgtttgtttgttagtgggaggagtggggagggctggctgtatggcctccagcctacctgttccccctgctcccagggcacatggttgggctgtgtcaacccttagggcctccatggggtcagttgtcccttctcacctcccagctctgtccccatcaggtccctgggtggcacgggaggatggactgacttccaggacctgttgtgtgacaggagctacagcttgggtctccctgcaagaagtctggcacgtctcacctcccccatcccggcccctggtcatctcacagcaaagaagcctcctccctcccgacctgccgccacactggagagggggcacaggggcgggggaggtttcctgttctgtgaaaggccgactccctgactccattcatgcccccccccccagcccctcccttcattcccattccccaacctaaagcctggcccggctcccagctgaatctggtcggaatccacgggctgcagattttccaaaacaatcgttgtatctttattgacttttttttttttttttttctgaatgcaatgactgttttttactcttaaggaaaataaacatcttttagaaacaaaaaaaaaaaa

SEQ ID NO: 247 - DNA, 925 bp, Homo sapiens
  ref <308>: DATABASE ACCESSION NUMBER: NCBI / NM_002796
  ref <309>: DATABASE ENTRY DATE: 2011-11-26
  ref <313>: RELEVANT RESIDUES IN SEQ ID NO: (1)..(925)
ttttttctgctaccgtgactaagatggaagcgtttttggggtcgcggtccggactttgggcggggggtccggccccaggacagttttaccgcattccgtccactcccgattccttcatggatccggcgtctgcactttacagaggtccaatcacgcggacccagaaccccatggtgaccgggacctcagtcctcggcgttaagttcgagggcggagtggtgattgccgcagacatgctgggatcctacggctccttggctcgtttccgcaacatctctcgcattatgcgagtcaacaacagtaccatgctgggtgcctctggcgactacgctgatttccagtatttgaagcaagttctcggccagatggtgattgatgaggagcttctgggagatggacacagctatagtcctagagctattcattcatggctgaccagggccatgtacagccggcgctcgaagatgaaccctttgtggaacaccatggtcatcggaggctatgctgatggagagagcttcctcggttatgtggacatgcttggtgtagcctatgaagccccttcgctggccactggttatggtgcatacttggctcagcctctgctgcgagaagttctggagaagcagccagtgctaagccagaccgaggcccgcgacttagtagaacgctgcatgcgagtgctgtactaccgagatgcccgttcttacaaccggtttcaaatcgccactgtcaccgaaaaaggtgttgaaatagagggaccattgtctacagagaccaactgggatattgcccacatgatcagtggctttgaatgaaatacagatgcattatccagaactgaagttgccctacttttaactttgaacttggctagttcaaagatagactcttcttttgtaaagtaaataaattcttcaaaatg

SEQ ID NO: 248 - DNA, 4759 bp, Homo sapiens
  ref <308>: DATABASE ACCESSION NUMBER: NCBI / NM_002794
  ref <309>: DATABASE ENTRY DATE: 2011-11-28
  ref <313>: RELEVANT RESIDUES IN SEQ ID NO: (1)..(4759)
ggggagattttaccgagcaacgtagggaaacggctgcctggctacctacccctttttgacacccacacgtgctcggcaccttacatacactgcgtgattttatcctaaagccacttttaaaatcttagtgtgtaaacagagaaactgggcgtcacataaggcaagtgacctgcacagcctgctccggaggagacccgtacgatcccagagacaagcactgaacataaggcacccggcgccgcgcccgctttgcaacctctcgcgacagttgtacgtcatccgagagcgccgtggaagtcgtgctgcaggcgtcgcgccaatcttcgctctgaggtgctgtctcaccggtgagacctggaagcgggcgagtctcgtgctgtgtcggacctgcagcccctggccttccgccaccatggagtacctcatcggtatccaaggccccgactatgttcttgtcgcctccgaccgggtggccgccagcaatattgtccagatgaaggacgatcatgacaagatgtttaagatgagtgaaaagatattactcctgtgtgttggagaggctggagacactgtacagtttgcagaatatattcagaaaaacgtgcaactttataagatgcgaaatggatatgaattgtctcccacggcagcagctaacttcacacgccgaaacctggctgactgtcttcggagtcggaccccatatcatgtgaacctcctcctggctggctatgatgagcatgaagggccagcgctgtattacatggactacctggcagccttggccaaggccccttttgcagcccacggctatggtgccttcctgactctcagtatcctcgaccgatactacacaccgactatctcacgtgagagggcagtggaactccttaggaaatgtctggaggagctccagaaacgcttcatcctgaatctgccaaccttcagtgttcgaatcattgacaaaaatggcatccatgacctggataacatttccttccccaaacagggctcctaacatcatgtcctccctcccacttgccagggaacttttttttgatgggctcctttatttttttctactcttttcaggcgcactcttgataaatggttaattcagaataaaggtgactatggatataattgagccctctggtccaggtctcagtttacctaatattacctcagaaaggatatggagggaagatgatctttttgccaggtctgacttttcttcctgctccgccctccattaacgctcagtaccctttagcagctgacggccccacgttctactccatgcttggcttcctttccaactagctctttcatatattttacttgctagtatctccattctctctaaagtagtggttctttttgcccttaaacttaaatttttaaattaattaacctgaattaataatacatgcacttaatgtaacatgcaaacagtacaaaaacatgtagtgaaaaatatttcttccagagctgggtgtggtggctcatacctgtaatcccagcactttgggaggccgaggcgggcggatcacgaggtcaagagagcgagaccatcctgaccaacatggtaaaaccccgtctctactaaaaatacaaaaattagctgggcgtggtggcacgcacccctagtcccagctactggggaggctgagacaggagaatcggtcgaacccgggaggcagaggttgcagtgagcctagatcgcgccactgtactccagcctggcaacagagtgagactccgtctcaaaaaaagaaggaaaaatgtttcttccatccctataatccagtcatctgcttcctgcttcccttcctggaggaaacttcagctactaatttcttatgttttttaagagatattctgttactgtgtaaagtatacatacatacagacacatgccccctttaaattttttagatttatttatttatttagagacagggtctcactctagcccaggctggagtgctgtggcgtaatcttggctcactgcaacctccgcctcccgggcccaagtgatcctcccatctcagcctcctgagtagctaggattacaggcgcacaccaccaatgcccagctagtttttgtgtttttcatagagacagggtctcaccatgtcattcaggttggtcttgaactcctgggctcaagcagtctgcctgccttggcttcccagtgctgggattacaggcgtgagccaccgtgcccggctaaaaagtatttttaagttctgcatattgcttatttcacttaacactatattagagattgttttatatcaatacatatagatatgcttattcttgttgacagttgcataattttccattaaattgatgtatcatgggcagttaaccagttactcgttttactcttagcataactttagggaacaatgtggatgttttgtggttaaagctattaaaacagtggttcttgaccagatgtgtgtttcagaatgttcatctcacatttccagttgctactgatgctgctggtctaggaaccacatatcaaaaccatttggtctccgactaagataaaccctactttatccaattctgtgctcctcttaatatcatatacagataggtttttgttttgtctgtgattaaatgtatcatctaagatactacctactgatcataacgttcatattaaagtattgggttaacattagatttgggtgtcttatacactatttaatacgccaatgataaatgccttacaccataagaagaaagctaatcattgagtaaatgggagaaaagagatgattcacgtcactacagttgattcaacctccaacaccaccatgaatatgcataggtttgagcttttagctagattcctgagtgtaaggcatctattttaaaagtgccacaggttggccgggtgcggtggctcatgcctgtaatcccagcactttggccgcccgccgaggcgggcggatcacctgaggtcaggagttcaagaccagcctggccaacatggtgaaaccccatctctactaaaaaaatatataacaattagccaggcgtggtggcacacgcctgtaaacccaactacttgggaggctgaggcaggagaattgcttgagcccgggagagggaggttgcagtgagccgagatcatgccactgcactccagcctggctgacagagcaagactctgtctcaaaaaaaaaaaaaaaaaaaaaaaaaaagcgccacagatgattctgacgccctacccagtggagtgctgctactaaagcacagactatcctgctacatgattttcccatctgtacaatgactgaaatagcacctattctatgtggtagatatgagaattccatgaagtaatataggtaaacatttagttcagggcttggcatgtggtaagtgctcagtaagtgtataatgattggtaaacttgttattctgcattcaggcctcaccagggatgacatacggttctctgcctttgaatgtaagtgtccccagggcaatctcaggcaagcctgcaaacccatcctgactctcagtgtttttttgccaatctggatctctttcctgagctccaaatcaactcattcctagatagctcaccctccagatttagggacatcgaactcagtatgtctaaagctgagccttaccatctgcccctctccaaaccgcctctatgacattctgtcttagagaattagagctacctggtttcccaagtgcccaagtcagaaacccaggcatcatttatttttaataaatgttttattttggaataaatttggttttacagaaaagttgcaaagataatatggtgtccttataccccttattcagtttctgtaatgttaacatcttctatataccacagtatgtttgtcaaaactgagaaaccaacattggttggtgtattagtattactaagctccaggctttattcagattttaccagtttttccactaattttcttctgttctaggatataatccaagatacaacattgcatttagctgggcatcatttttatgccattctttatctcctgtctctacatggccaccaagttctggcatttctacatcctaaatcttttaattttattataattttttattgttgtttttcagagacagggtcttgctccatcacctaggctggagtacagtggcacgatcgtagcttactgcagtaagttcacttgaactcctgggctcaagtgaacctcttaccccagcctcccaactagctgggactagaggggtgcaccactgcacccagctaattttgtcaaaattttttgtagagacagggtctcgccatgttgcctaggctggtctcgaactcttggcctcaagtgatcctcccaccttggtctgccaaagcactgggattacagatgtgagccactgcacccagcctaatctttataaatctccatccccattactctggttcaccccctatcgtttcttagactatttaacagcctcctaacttcactctacttttaatctcttccctctccaggtctttctccatattttaaaaaactagtttcaccatccattcctctctgcccttaaaactttctggtggttttccatggcttaagagaataaagcccaattctttgatttgacatgctaggcattccataatcctctccgaacctaactccccacttcctttccctcctttacacctcataaagcctgtgttccaactaaaaaaaaaaaaaaaaaa

SEQ ID NO: 249 - DNA, 938 bp, Homo sapiens
  ref <308>: DATABASE ACCESSION NUMBER: NCBI / NM_002793
  ref <309>: DATABASE ENTRY DATE: 2011-11-11
  ref <313>: RELEVANT RESIDUES IN SEQ ID NO: (1)..(938)
gagaagccggaagtggcgtaacgtccggtcaaggcagccatctcgccgtgagacagcaagtgtcggatccgcaggcgcagccgtgcgatgttgtcctctacagccatgtattcggctcctggcagagacttggggatggaaccgcacagagccgcgggccctttgcagctgcgattttcgccctacgttttcaacggaggtactatactggcaattgctggagaagattttgcaattgttgcttctgatactcgattgagtgaagggttttcaattcatacgcgggatagccccaaatgttacaaattaacagacaaaacagtcattggatgcagcggttttcatggagactgtcttacgctgacaaagattattgaagcaagactaaagatgtataagcattccaataataaggccatgactacgggggcaattgctgcaatgctgtctacaatcctgtattcaaggcgcttctttccatactatgtttacaacatcatcggtggacttgatgaagaaggaaagggggctgtatacagctttgatccagtagggtcttaccagagagactccttcaaggctggaggctcagcaagtgccatgctacagcccctgcttgacaaccaggttggttttaagaacatgcagaatgtggagcatgttccgctgtccttggacagagccatgcggctggtgaaagatgtcttcatttctgcggctgagagagatgtgtacactggggacgcactccggatctgcatagtgaccaaagagggcatcagggaggaaactgtttccttaaggaaggactgatctgtgtgctcttatcaccaatcagttcagacctggttgattttgtactttggaactgtaccttggatggttttgtttattaaaagagaaacctgaagtactcaaaaaaaaaaaaaaaaaaaaaa

SEQ ID NO: 250 - DNA, 7505 bp, Homo sapiens
  ref <308>: DATABASE ACCESSION NUMBER: NCBI / NM_002473
  ref <309>: DATABASE ENTRY DATE: 2011-12-24
  ref <313>: RELEVANT RESIDUES IN SEQ ID NO: (1)..(7505)
gagggcggggcgggaaggcggcgaggagccgagctgggtgcggtgaggcgcgcagatcaccgcggttcctgggcagggcacggaaggctaagcaaggctgacctgctgcagctcccgcctcgtgcgctcgccccacccggccgccgcccgagcgctcgagaaagtcctctcgggagaagcagcgcctgttcccggggcagatccaggttcaggtcctggctataagtcaccatggcacagcaagctgccgataagtatctctatgtggataaaaacttcatcaacaatccgctggcccaggccgactgggctgccaagaagctggtatgggtgccttccgacaagagtggctttgagccagccagcctcaaggaggaggtgggcgaagaggccatcgtggagctggtggagaatgggaagaaggtgaaggtgaacaaggatgacatccagaagatgaacccgcccaagttctccaaggtggaggacatggcagagctcacgtgcctcaacgaagcctcggtgctgcacaacctcaaggagcgttactactcagggctcatctacacctattcaggcctgttctgtgtggtcatcaatccttacaagaacctgcccatctactctgaagagattgtggaaatgtacaagggcaagaagaggcacgagatgccccctcacatctatgccatcacagacaccgcctacaggagtatgatgcaagaccgagaagatcaatccatcttgtgcactggtgaatctggagctggcaagacggagaacaccaagaaggtcatccagtatctggcgtacgtggcgtcctcgcacaagagcaagaaggaccagggcgagctggagcggcagctgctgcaggccaaccccatcctggaggccttcgggaacgccaagaccgtgaagaatgacaactcctcccgcttcggcaaattcattcgcatcaactttgatgtcaatggctacattgttggagccaacattgagacttatcttttggagaaatctcgtgctatccgccaagccaaggaagaacggaccttccacatcttctattatctcctgtctggggctggagagcacctgaagaccgatctcctgttggagccgtacaacaaataccgcttcctgtccaatggacacgtcaccatccccgggcagcaggacaaggacatgttccaggagaccatggaggccatgaggattatgggcatcccagaagaggagcaaatgggcctgctgcgggtcatctcaggggttcttcagctcggcaacatcgtcttcaagaaggagcggaacactgaccaggcgtccatgcccgacaacacagctgcccaaaaggtgtcccatctcttgggtatcaatgtgaccgatttcaccagaggaatcctcaccccgcgcatcaaggtgggacgggattacgtccagaaggcgcagactaaagagcaggctgactttgccatcgaggccttggccaaggcgacctatgagcggatgttccgctggctggtgctgcgcatcaacaaggctctggacaagaccaagaggcagggcgcctccttcatcgggatcctggacattgccggcttcgagatctttgatctgaactcgtttgagcagctgtgcatcaattacaccaatgagaagctgcagcagctcttcaaccacaccatgttcatcctggagcaggaggagtaccagcgcgagggcatcgagtggaacttcatcgactttggcctcgacctgcagccctgcatcgacctcattgagaagccagcaggccccccgggcattctggccctgctggacgaggagtgctggttccccaaagccaccgacaagagcttcgtggagaaggtgatgcaggagcagggcacccaccccaagttccagaagcccaagcagctgaaggacaaagctgatttctgcattatccactatgccggcaaggtggattacaaagctgacgagtggctgatgaagaacatggatcccctgaatgacaacatcgccacactgctccaccagtcctctgacaagtttgtctcggagctgtggaaggatgtggaccgcatcatcggcctggaccaggtggccggcatgtcggagaccgcactgcccggggccttcaagacgcggaagggcatgttccgcactgtggggcagctttacaaggagcagctggccaagctgatggctacgctgaggaacacgaaccccaactttgtccgctgcatcatccccaaccacgagaagaaggccggcaagctggacccgcatctcgtgctggaccagctgcgctgcaacggtgttctcgagggcatccgtatctgccgccagggcttccccaacagggtggtcttccaggagtttcggcagagatatgagatcctgactccaaactccattcccaagggtttcatggacgggaagcaggcgtgcgtgctcatgataaaagccctggagctcgacagcaatctgtaccgcattggccagagcaaagtcttcttccgtgccggtgtgctggcccacctggaggaggagcgagacctgaagatcaccgacgtcatcatagggttccaggcctgctgcaggggctacctggccaggaaagcatttgccaagcggcagcagcagcttaccgccatgaaggtcctccagcggaactgcgctgcctacctgaagctgcggaactggcagtggtggcggctcttcaccaaggtcaagccgctgctgcaggtgagccggcaggaggaggagatgatggccaaggaggaggagctggtgaaggtcagagagaagcagctggctgcggagaacaggctcacggagatggagacgctgcagtctcagctcatggcagagaaattgcagctgcaggagcagctccaggcagaaaccgagctgtgtgccgaggctgaggagctccgggcccgcctgaccgccaagaagcaggaattagaagagatctgccatgacctagaggccagggtggaggaggaggaggagcgctgccagcacctgcaggcggagaagaagaagatgcagcagaacatccaggagcttgaggagcagctggaggaggaggagagcgcccggcagaagctgcagctggagaaggtgaccaccgaggcgaagctgaaaaagctggaggaggagcagatcatcctggaggaccagaactgcaagctggccaaggaaaagaaactgctggaagacagaatagctgagttcaccaccaacctcacagaagaggaggagaaatctaagagcctcgccaagctcaagaacaagcatgaggcaatgatcactgacttggaagagcgcctccgcagggaggagaagcagcgacaggagctggagaagacccgccggaagctggagggagactccacagacctcagcgaccagatcgccgagctccaggcccagatcgcggagctcaagatgcagctggccaagaaagaggaggagctccaggccgccctggccagagtggaagaggaagctgcccagaagaacatggccctcaagaagatccgggagctggaatctcagatctctgaactccaggaagacctggagtctgagcgtgcttccaggaataaagctgagaagcagaaacgggaccttggggaagagctagaggctctgaaaacagagttggaggacacgctggattccacagctgcccagcaggagctcaggtcaaaacgtgagcaggaggtgaacatcctgaagaagaccctggaggaggaggccaagacccacgaggcccagatccaggagatgaggcagaagcactcacaggccgtggaggagctggcggagcagctggagcagacgaagcgggtgaaagcaaacctcgagaaggcaaagcagactctggagaacgagcggggggagctggccaacgaggtgaaggtgctgctgcagggcaaaggggactcggagcacaagcgcaagaaagtggaggcgcagctgcaggagctgcaggtcaagttcaacgagggagagcgcgtgcgcacagagctggccgacaaggtcaccaagctgcaggtggagctggacaacgtgaccgggcttctcagccagtccgacagcaagtccagcaagctcaccaaggacttctccgcgctggagtcccagctgcaggacactcaggagctgctgcaggaggagaaccggcagaagctgagcctgagcaccaagctcaagcaggtggaggacgagaagaattccttccgggagcagctggaggaggaggaggaggccaagcacaacctggagaagcagatcgccaccctccatgcccaggtggccgacatgaaaaagaagatggaggacagtgtggggtgcctggaaactgctgaggaggtgaagaggaagctccagaaggacctggagggcctgagccagcggcacgaggagaaggtggccgcctacgacaagctggagaagaccaagacgcggctgcagcaggagctggacgacctgctggtggacctggaccaccagcgccagagcgcgtgcaacctggagaagaagcagaagaagtttgaccagctcctggcggaggagaagaccatctctgccaagtatgcagaggagcgcgaccgggctgaggcggaggcccgagagaaggagaccaaggctctgtcgctggcccgggccctggaggaagccatggagcagaaggcggagctggagcggctcaacaagcagttccgcacggagatggaggaccttatgagctccaaggatgatgtgggcaagagtgtccacgagctggagaagtccaagcgggccctagagcagcaggtggaggagatgaagacgcagctggaagagctggaggacgagctgcaggccaccgaagatgccaagctgcggttggaggtcaacctgcaggccatgaaggcccagttcgagcgggacctgcagggccgggacgagcagagcgaggagaagaagaagcagctggtcagacaggtgcgggagatggaggcagagctggaggacgagaggaagcagcgctcgatggcagtggccgcccggaagaagctggagatggacctgaaggacctggaggcgcacatcgactcggccaacaagaaccgggacgaagccatcaaacagctgcggaagctgcaggcccagatgaaggactgcatgcgcgagctggatgacacccgcgcctctcgtgaggagatcctggcccaggccaaagagaacgagaagaagctgaagagcatggaggccgagatgatccagttgcaggaggaactggcagccgcggagcgtgccaagcgccaggcccagcaggagcgggatgagctggctgacgagatcgccaacagcagcggcaaaggagccctggcgttagaggagaagcggcgtctggaggcccgcatcgcccagctggaggaggagctggaggaggagcagggcaacacggagctgatcaacgaccggctgaagaaggccaacctgcagatcgaccagatcaacaccgacctgaacctggagcgcagccacgcccagaagaacgagaatgctcggcagcagctggaacgccagaacaaggagcttaaggtcaagctgcaggagatggagggcactgtcaagtccaagtacaaggcctccatcaccgccctcgaggccaagattgcacagctggaggagcagctggacaacgagaccaaggagcgccaggcagcctgcaaacaggtgcgtcggaccgagaagaagctgaaggatgtgctgctgcaggtggatgacgagcggaggaacgccgagcagtacaaggaccaggccgacaaggcatctacccgcctgaagcagctcaagcggcagctggaggaggccgaagaggaggcccagcgggccaacgcctcccgccggaaactgcagcgcgagctggaggacgccactgagacggccgatgccatgaaccgcgaagtcagctccctaaagaacaagctcaggcgcggggacctgccgtttgtcgtgccccgccgaatggcccggaaaggcgccggggatggctccgacgaagaggtagatggcaaagcggatggggctgaggccaaacctgccgaataagcctcttctcctgcagcctgagatggatggacagacagacaccacagcctccccttcccagaccccgcagcacgcctctccccaccttcttgggactgctgtgaacatgcctcctcctgccctccgccccgtccccccatcccgtttccctccaggtgttgttgagggcatttggcttcctctgctgcatccccttccagctccctcccctgctcagaatctgataccaaagagacagggcccgggcccaggcagagagcgaccagcaggctcctcagccctctcttgccaaaaagcacaagatgttgaggcgagcagggcaggcccccggggaggggccagagttttctatgaatctatttttcttcagactgaggccttttggtagtcggagcccccgcagtcgtcagcctccctgacgtctgccaccagcgcccccactcctcctcctttctttgctgtttgcaatcacacgtggtgacctcacacacctctgccccttgggcctcccactcccatggctctgggcggtccagaaggagcaggccctgggcctccacctctgtgcagggcacagaaggctggggtggggggaggagtggattcctccccaccctgtcccaggcagcgccactgtccgctgtctccctcctgattctaaaatgtctcaagtgcaatgccccctcccctcctttaccgaggacagcctgcctctgccacagcaaggctgtcggggtcaagctggaaaggccagcagccttccagtggcttctcccaacactcttggggaccaaatatatttaatggttaagggacttgtcccaagtctgacagccagagcgttagaggggccagcggccctcccaggcgatcttgtgtctactctaggactgggcccgagggtggtttacctgcaccgttgactcagtatagtttaaaaatctgccacctgcacaggtatttttgaaagcaaaataaggttttcttttttcccctttcttgtaataaatgataaaattccgagtctttctcactgcctttgtttagaagagagtagctcgtcctcactggtctacactggttgccgaatttacttgtattcctaactgttttgtatatgctgcattgagacttacggcaagaaggcattttttttttttaaaggaaacaaactctcaaatcatgaagtgatataaaagctgcatatgcctacaaagctctgaattcaggtcccagttgctgtcacaaaggagtgagtgaaactcccaccctacccccttttttatataataaaagtgccttagcatgtgttgcagctgtcaccactacagtaagctggtttacagatgttttccactgagcatcacaataaagagaaccatgtgctacga

SEQ ID NO: 251 - DNA, 2856 bp, Homo sapiens
  ref <308>: DATABASE ACCESSION NUMBER: NCBI / NM_001810
  ref <309>: DATABASE ENTRY DATE: 2011-11-19
  ref <313>: RELEVANT RESIDUES IN SEQ ID NO: (1)..(2856)
gcccgccgcccggcgacgcgcccgccggcgtccccggaggtgcccccggcccggccgggtcgtcgccccgccgccgcgcccgcgagccgctttgtctcgggcggggcgcgcgggagaggccgccaggtgccccccgccacgggcccgggccccccgccccggggcggcggcggcggcgccgggccccggggcggggggcgcgccgggatgggccccaagaggcgacagctgacgttccgggagaagtcacggatcatccaggaggtggaggagaatccggacctgcgcaagggcgagatcgcgcggcgcttcaacatcccgccgtccacgctgagcacgatcctgaagaacaagcgcgccatcctggcgtcggagcgcaagtacggggtggcctccacctgccgcaagaccaacaagctgtctccctacgacaagctcgagggcttgctcatcgcctggttccagcagatccgcgccgccggcctgccggtcaagggcatcatcctcaaggagaaggcgctgcgcatagccgaggagctgggcatggacgacttcaccgcctccaacggctggctggaccgcttccgccggcgccacggcgtggtgtcctgcagcggcgtggcccgcgcccgcgcgcgaaacgctgccccccgcaccccggcggcgcctgccagtccggccgcggtgccctcggagggcagtggcgggagcactactggttggcgcgctcgggaggagcagccgccgtcggtggccgagggctacgcctcgcaggacgtgttcagcgccaccgagaccagtctatggtacgacttcctgcccgaccaggccgcggggctgtgcggaggcgacggacggccgcgtcaagccacccagcgcctgagcgtcctgctatgcgccaatgccgacggcagcgagaagctgcccccgctggtggccggcaagtcggccaagccccgcgcaggccaagccggcctgccctgcgactacaccgccaactccaagggtggtgtcaccacccaggccctggccaagtacttgaaggccttggacacccgaatggctgcagagtctcgccgggtcctgctgttggccggccgcttggctgcccagtccttggacacctcgggcctgcggcatgtgcagctggccttcttccctcccggcaccgtgcatccgctggagaggggagtggtccagcaggtgaagggccactaccgccaggccatgctgctcaaggccatggccgcgctagagggccaggatccctcaggcctgcagctgggtctcacggaggccctgcactttgtggctgccgcctggcaggcagtggagccttcggacatagccgcctgctttcgtgaggctggctttgggggtggccctaatgccaccatcaccacttccctcaagagtgagggagaggaagaggaggaggaggaggaagaagaggaggaggaagagggtgaaggagaggaagaggaggaggaaggggaggaggaggaggaggaagggggggaaggagaggaattgggggaggaagaggaggtggaggaggagggtgatgttgatagtgatgaagaagaggaggaagatgaggagagctcctcggagggcttggaggctgaggactgggcccagggagtagtggaggccggtggcagcttcggggcttatggtgcccaggaggaagcccagtgccctactctgcatttcctggaaggtggggaggactctgattcagacagtgaggaagaggacgatgaggaagaggatgatgaagatgaagacgacgatgatgatgaggaggatggtgatgaggtgcctgtacccagctttggggaggccatggcttactttgccatggtcaagaggtacctgacctccttccccattgatgaccgcgtgcagagccacatcctccacttggaacacgatctggttcatgtgaccaggaagaaccacgccaggcaggcgggagttcgaggtcttggacatcaaagctgagtcactggacctagctgtgcccccaacctagattggcagcaccaccccagggcagaggactctctgggcacccgctgtgcatggagccagagtgcagagccccagatcctttagtaatgcttcccctggtcctgcaacaggcccggtcacctcggccgggcccggggctgaggtcagcctcactgcctgcttattgcctctttctcagaatcctctttcctccccatttggccctgggctcaggggaccaggtggggcgggtggggagctgtccggtgctaccacaccgtgccctcagtggactaaccacagcagcagccagggatgggccctggaggttcccggccggagagtgcctctcccctctgccatccacgtcaggtctttggtggggggaccccaaagccattctgggaagggctccagaagaaggtccagcctaggccccctgcaaggctggcagcccccacccccaccccccaggccgccttgagaagcacagtttaactcactgcgggctcctgagcctgcttctgcctgctttccacctccccagtccctttctctggccctgtccatgtgactttggcccttggttttctttccagattggaggtttccaagaggccccccaccgtggaagtaaccaagggcgcttccttgtgggcagctgcaggccccatgcctctcctccctctctggcagggccccatcctgggcagaggggcctggggctgggcccagagtccagccgtccagctgctcctttcccagtttgatttcaataaatctgtccactccccttttgtgggggtgaacgttttaacagccaaaaaaaaaaaaaaaaaa

SEQ ID NO: 252 - DNA, 743 bp, Homo sapiens
  ref <308>: DATABASE ACCESSION NUMBER: NCBI / NM_002624
  ref <309>: DATABASE ENTRY DATE: 2011-11-21
  ref <313>: RELEVANT RESIDUES IN SEQ ID NO: (1)..(743)
gaggatcatagagctgtctggcgcagcgaggcctcccggcgccaccgagacgcgcagaggacggctagagcgttgctcgccgagagacttcctcttcgttaagtcggccttcccaacatggcgcagtctattaacatcacggagctgaatctgccgcagctagaaatgctcaagaaccagctggaccaggaagtggagttcttgtccacgtccattgctcagctcaaagtggtacagaccaagtatgtggaagccaaggactgtctgaacgtgctgaacaagagcaacgaggggaaagaattactcgtcccactgacgagttctatgtatgtccctgggaagctgcatgatgtggaacacgtgctcatcgatgtgggaactgggtactatgtagagaagacagctgaggatgccaaggacttcttcaagaggaagatagattttctaaccaagcagatggagaaaatccaaccagctcttcaggagaagcacgccatgaaacaggccgtcatggaaatgatgagtcagaagattcagcagctcacagccctgggggcagctcaggctactgctaaggcctgagagtttttgcagaaatggggcagagggacaccctttgggcgtggcttcctggtgatgggaagggtcttgtgttttaatgccaataaatgtgccagctgggcagaaaaaaaaaaaaaaaaaaaaaaaaaaaaaaaaaaaaaaaaaaaaaaaaaaaaaaaaaa

SEQ ID NO: 253 - DNA, 1694 bp, Homo sapiens
  ref <308>: DATABASE ACCESSION NUMBER: NCBI / NM_004710
  ref <309>: DATABASE ENTRY DATE: 2011-08-13
  ref <313>: RELEVANT RESIDUES IN SEQ ID NO: (1)..(1694)
ggcggcggcagcggcggcgacggcgacatggagagcggggcctacggcgcggccaaggcgggcggctccttcgacctgcggcgcttcctgacgcagccgcaggtggtggcgcgcgccgtgtgcttggtcttcgccttgatcgtgttctcctgcatctatggtgagggctacagcaatgcccacgagtctaagcagatgtactgcgtgttcaaccgcaacgaggatgcctgccgctatggcagtgccatcggggtgctggccttcctggcctcggccttcttcttggtggtcgacgcgtatttcccccagatcagcaacgccactgaccgcaagtacctggtcattggtgacctgctcttctcagctctctggaccttcctgtggtttgttggtttctgcttcctcaccaaccagtgggcagtcaccaacccgaaggacgtgctggtgggggccgactctgtgagggcagccatcaccttcagcttcttttccatcttctcctggggtgtgctggcctccctggcctaccagcgctacaaggctggcgtggacgacttcatccagaattacgttgaccccactccggaccccaacactgcctacgcctcctacccaggtgcatctgtggacaactaccaacagccacccttcacccagaacgcggagaccaccgagggctaccagccgccccctgtgtactgagcggcggttagcgtgggaagggggacagagagggccctcccctctgccctggactttcccatgagcctcctggaactgccagcccctctctttcacctgttccatcctgtgcagctgacacacagctaaggagcctcatagcctggcgggggctggcagagccacaccccaagtgcctgtgcccagagggcttcagtcagccgctcactcctccagggcacttttaggaaagggtttttagctagtgtttttcctcgcttttaatgacctcagccccgcctgcagtggctagaagccagcaggtgcccatgtgctactgacaagtgcctcagcttccccccggcccgggtcaggccgtgggagccgctattatctgcgttctctgccaaagactcgtgggggccatcacacctgccctgtgcagcggagccggaccaggctcttgtgtcctcactcaggtttgcttcccctgtgcccactgctgtatgatctgggggccaccaccctgtgccggtggcctctgggctgcctcccgtggtgtgagggcggggctggtgctcatggcacttcctccttgctcccacccctggcagcagggaagggctttgcctgacaacacccagctttatgtaaatattctgcagttgttacttaggaagcctggggagggcaggggtgccccatggctcccagactctgtctgtgccgagtgtattataaaatcgtgggggagatgcccggcctgggatgctgtttggagacggaataaatgttttctcattcagtctccagtcattggttgagccacagcctaggggttggaggaagactccactctgggtacacccttaggggctggctttatggaacttgtagtttgaacaaggcagtggcaatccgccccctccagcctgcctggctggcccccttccctctgtctggggtcgcattccgcacaagcctttcatcaacatcttaaaatagtaactgtg

SEQ ID NO: 254 - DNA, 4194 bp, Homo sapiens
  ref <308>: DATABASE ACCESSION NUMBER: NCBI / NM_001127
  ref <309>: DATABASE ENTRY DATE: 2011-11-27
  ref <313>: RELEVANT RESIDUES IN SEQ ID NO: (1)..(4194)
cccgcgcgcgggcagctcacttccgcccggcaggtgacagccgcggggctccgagccgccggcagcccggacgcaccgggagagcgagaggtggaggccgcggacattttggtgccaagccgaaccgagccggggcgccgggagctattgggacctgcggaagcctggctacagataagggaccaaaatgactgactcaaaatatttcaccacgaccaagaaaggggagatcttcgagctgaaggcagagctcaacagtgacaagaaggagaagaagaaggaggcagtgaagaaagtgattgcatcgatgaccgtgggcaaagatgtcagtgccctcttccccgatgtggtcaactgcatgcagacggacaacctggagctgaagaagctagtatacctctacttgatgaattacgccaagagtcagcctgacatggccattatggccgtcaacacctttgtgaaggactgtgaggaccccaaccccctcatccgagccctggcagtgcggaccatgggctgcatccgcgttgacaagatcacagagtacctgtgcgagccactccggaagtgcctgaaggacgaggatccatatgtgcgcaagacagcagctgtgtgcgtggccaagctccacgacatcaacgcccagctggtggaggaccagggcttcctggacacccttaaagacctcatctccgactctaaccccatggtggtggccaatgcagtggcagcgctctcagaaattgccgagtctcaccccagcagcaacctgctcgatctgaacccacagtccatcaacaagctgctgacagccctcaatgagtgcaccgagtggggccagatcttcatcctggactgcctcgccaactatatgcccaaggacgaccgcgaggcccagagcatctgtgagcgggtcacccccaggctctcccatgccaactccgctgtggtgctctctgctgtgaaggtgctgatgaagttcatggagatgttgtctaaggacttggactactacggcacactgctcaagaagctggccccacccctggtcacactgctgtcagccgagccagagctgcagtatgtggccctgcgcaacatcaatctcatcgtgcagaaaaggcctgagatcctgaagcatgagatgaaggtgttcttcgtgaagtacaacgaccctatctacgtgaagctggagaagctggacatcatgatccgcctggcctctcaggccaacatcgcccaggtgttggcagagctgaaagagtacgcaacagaagtggatgtggactttgtacggaaggctgtgcgtgctattggccgctgcgccatcaaggtggagcaatctgcggagcgctgtgtgagcacgctgctcgacctcatccagaccaaggtcaactatgtggtccaggaggccatcgtggtcatcaaggacatcttccgcaagtaccccaacaagtatgagagtgtgattgccacactgtgtgagaatctggactccctggatgagcctgaggcccgggctgccatgatctggattgtgggcgagtacgcggaacggatcgacaacgcagatgagctgctggagagcttcctcgagggcttccatgacgagagcacacaggtccagctgcagctgctgacagccattgtgaaactctttctaaagaagccaacagagacccaggagctggtgcagcaggtcctcagtttggccactcaggactcagataacccagacctgcgggaccgtggctacatctactggcgcctgctgtccacggacccggtggcagccaaggaggtggtgttggctgagaagccactcatctctgaagagacggacctcatcgagcccacactgttagacgagcttatctgctacatcggcacgctggcttccgtctaccataagcctcccagtgcctttgtggaggggggccggggcgtcgtgcacaagagcctgccacctcgcacggcctcgagtgagagcgcagagagccctgagacagcccctactggagcacctcctggggagcagccagatgtcatccccgcccagggcgacctgctgggtgacctcctcaacctggacctcggccccccagtgagcggcccacccctggccacctcctcggtgcagatgggagctgtggaccttcttggcggtggccttgacagcctgatgggggatgagcctgaagggattgggggcaccaacttcgtggcacctccaacagcagcagtaccagccaatcttggagcacccatcggcagtggcctgagtgacctctttgacctgaccagtggcgtgggcaccctgtcaggatcatatgtggcccccaaagcagtctggctcccagccatgaaggctaaggggctggagatctcaggcaccttcacccgccaggtgggctccatctccatggacctgcagctgaccaacaaggccttgcaggtcatgaccgactttgccatccagttcaaccgcaacagctttggcctggcccccgccgcccccctccaggtccacgcgccactcagccccaaccagacagtggagatctccctgcctctcagcacggtgggctcggtcatgaagatggagcctctgaacaacctccaggtggccgtgaagaacaacatcgatgtcttctacttcagcaccttgtacccactgcacatcctctttgtggaggacgggaagatggaccggcagatgttcctggccacatggaaggatattcccaatgagaatgaggcccagttccagatcagagactgccccctcaatgcagaggctgcgagcagcaagctgcagagcagcaacatcttcactgtcgccaagaggaacgtggagggccaggacatgctctaccagtccctgaagctgaccaacggcatctgggtgctggcggagctgcggatccagccgggcaaccccagctgcacggacttagagctgtccctgaagtgtcgagcaccagaggtgtcccagcacgtgtaccaggcctacgagaccatcctcaagaactgagaccccggccagcgcccaccccagccttctgcccgccccatcgaggaggcccctcgggggcagcacatcttcctcctcgcaggagggaccaggcggggctccaggccactcagtgggctccctggtcctgatggcagaacccacccgatccctggggtagggcaccaccccctcctggggtgagagcgcagtgcactcccgtgctctgggacacccctgctcctgtggctgtgatgtggggttaagtgaggtggggaccaaaggaaacagagccagagcagccacagaagctgtgcctgaagggtgagtgtggagcttgcccctccggctcacagccccggcagcccctggctccttggtctctccggttggtgttaaagggccctccactgccacctctcatgggatggaccctgccaacctggcctgggtgtgcagggaggggttccccttggtaccaggagagctgctcacttagggcctggggctcaaggagctgtaggtgccggcagaggggcagagctaggctgggaggagcccagggcctgcaccacccacttgcaaccaccaggctggtgccctgcagctgtgccagttgggccacagcctcccgagtgctgacccacatggtcaagaccaggcagaagctcccagagcccctgtctcgggctccccaccgactggcagctgcactatccccaactccccacttctgccccaagggtggtcactgcctgtgatacattcctcagtgtcgcctctgagcccaggcctcctgccacaaagactgggccgagagatggggctgggtaagcgggtgcgcctcctgtttgggtttcttcggggtttctctgtagtgtctgctgccctcctcctggcctcccaggtttcagttgtgtctgacagagcattaggttttcctgttactgctgtgtaataataaagaaagattcggcttttggcaatcacggacacttttttcccctccaccgaatgtcaggattgaaagctgcctccgagtggttggggatggttttctgaccctacggtaactagatctaatatatatcatcagaaaatatatattgtatgtttactcttattttcagaaagagaaaatgaataaaaatgatgacatcaaaaaaaaaaaaaaaaaa

SEQ ID NO: 255 - DNA, 1077 bp, Homo sapiens
  ref <308>: DATABASE ACCESSION NUMBER: NCBI / NM_002107
  ref <309>: DATABASE ENTRY DATE: 2011-11-28
  ref <313>: RELEVANT RESIDUES IN SEQ ID NO: (1)..(1077)
gtcagccatctttcaattgtgttcgcagccgccgccgcgccgccgtcgctctccaacgccagcgccgcctctcgctcgccgagctccagccgaaggagaaggggggtaagtaaggaggtctctgtaccatggctcgtacaaagcagactgcccgcaaatcgaccggtggtaaagcacccaggaagcaactggctacaaaagccgctcgcaagagtgcgccctctactggaggggtgaagaaacctcatcgttacaggcctggtactgtggcgctccgtgaaattagacgttatcagaagtccactgaacttctgattcgcaaacttcccttccagcgtctggtgcgagaaattgctcaggactttaaaacagatctgcgcttccagagcgcagctatcggtgctttgcaggaggcaagtgaggcctatctggttggcctttttgaagacaccaacctgtgtgctatccatgccaaacgtgtaacaattatgccaaaagacatccagctagcacgccgcatacgtggagaacgtgcttaagaatccactatgatgggaaacatttcattctcaaaaaaaaaaaaaaaaatttctcttcttcctgttattggtagttctgaacgttagatattttttttccatggggtcaaaaggtacctaagtatatgattgcgagtggaaaaataggggacagaaatcaggtattggcagtttttccattttcatttgtgtgtgaatttttaatataaatgcggagacgtaaagcattaatgcaagttaaaatgtttcagtgaacaagtttcagcggttcaactttataataattataaataaacctgttaaatttttctggacaatgccagcatttggatttttttaaaacaagtaaatttcttattgatggcaactaaatggtgtttgtagcatttttatcatacagtagattccatccattcactatacttttctaactgagttgtcctacatgcaagtacatgtttttaatgttgtctgtcttctgtgctgttcctgtaagtttgctattaaaatacattaaactataaaaaaaaaaaaaaaa

SEQ ID NO: 256 - DNA, 5069 bp, Homo sapiens
  ref <308>: DATABASE ACCESSION NUMBER: NCBI / NM_003899
  ref <309>: DATABASE ENTRY DATE: 2012-01-01
  ref <313>: RELEVANT RESIDUES IN SEQ ID NO: (1)..(5069)
aaaaaagggtgaggagaagcagcggctgagcgggttggcatctggggcagcgggctcgctccaggccgtcgggggccgctcgccagcgtcgcccgctgtgttgggagcgcgggccgtgggcgtcgctcggccttgtccgcggcgtccccgctgccggccacggcgctcagcgcttgtgctctgtattgcaggtctaccccgagccccggagcgagagcgagtgcctgagcaacatccgcgagttcctgcgcggctgcggggcttccctgcggctggagacgtttgatgcaaatgatttgtatcaggggcagaattttaacaaggtcctcagttccttagtgactctaaataaagtaacagcagacatcgggctggggagtgactccgtgtgtgcccggccctcgtctcaccgcataaagtcttttgactcccttggatcacagtctttgcacactcggacttcaaaactgttccagggccagtatcggagtttggacatgaccgataatagcaacaatcaactggtagtaagagcaaagtttaacttccagcagaccaatgaggacgagctttccttctcaaaaggagacgtcatccatgtcacccgtgtggaagagggaggctggtgggagggcacactcaacggccggaccggctggttccccagcaactacgtgcgcgaggtcaaggccagcgagaagcctgtgtctcccaaatcaggaacactgaagagccctcccaaaggatttgatacgactgccataaacaaaagctattacaatgtggtgctacagaatattttagaaacagaaaatgaatattctaaagaacttcagactgtgctttcaacgtacctacggccattgcagaccagtgagaagttaagttcagcaaacatttcatatttaatgggaaatctagaagaaatatgttctttccagcaaatgctcgtacagtctttagaagaatgcaccaagttgcccgaagctcagcagagagtcggaggctgctttttaaacctgatgccacagatgaaaaccctgtacctcacgtattgtgccaatcacccttctgcagtgaatgtcctcacggaacacagtgaggagttgggggagttcatggagaccaaaggtgccagcagccctgggattctcgtgctgaccacgggcctgagcaaacccttcatgcgcctggataaataccctacgctgctcaaagagctcgagagacacatggaggattatcatacagatagacaagatattcaaaaatccatggctgccttcaaaaacctttcagcccaatgtcaagaagtccggaagaggaaagagcttgagctgcagatcctgacggaagccatccggaactgggagggcgatgacattaaaactctgggcaacgtcacttacatgtcccaggtcctgattcagtgtgccggaagtgaggaaaagaatgaaagatatcttctactcttcccaaatgttttgctaatgttgtctgccagtcctaggatgagtggctttatctatcagggaaagcttccaacgacaggaatgacaatcacaaagcttgaggacagtgaaaatcatagaaatgcatttgaaatatcagggagcatgattgagcggatattagtgtcgtgcaacaaccagcaggatctgcaggaatgggtggagcacctacagaagcaaacgaaggtcacgtctgtgggaaaccccaccataaagcctcattcagtgccatctcataccctcccctcccacccggtcactccgtccagcaagcacgcagacagcaagcccgcgccgctgacgcccgcctaccacacgctgccccacccctcccaccacggcaccccgcacaccaccatcaactggggacccctggagcctccgaaaacacccaagccctggagcctgagctgcctgcggcccgcgcctcccctccggccctcagctgctctctgctacaaggaggatcttagtaagagccctaagaccatgaaaaagctgctgcccaagcgcaaacctgaacggaagccttcagatgaggagttcgcgtcccggaaaagcacagctgctttggaagaagatgctcagattctgaaagtcattgaagcttactgcaccagcgccaaaacaaggcaaacactcaattcaagttcacgcaaagaatctgctccacaagttttgcttccagaagaagagaaaattatagtggaagaaactaaaagtaatggtcagacagtgatagaagaaaagagtcttgtggataccgtatatgcattaaaggatgaagttcaagaattaagacaggacaacaaaaagatgaagaaatctctagaggaagaacagagagcccgcaaagacctggagaagctggtgaggaaagtcctgaagaacatgaatgatcctgcctgggatgagaccaatctataagggatgtcctcagttctttctgttgaagaccagttctgaggtgaagctgggcacccctgacccaagtcggggtgcactcaggaccacagggcagggctgggtggggcgccaccttgctctctgtatatagaaaagctggagcttattctgcgaatggagacgatcaaaccatgactgatgaatccagacaggagggattgactctgaggacctgagctacatcaatccactctgtgaacatctcagttacctcattctgcaataagttcagtgactgactaaaagtcttgtttttccagactttgaattgaatatataaatattatatatacatgtttcttgtaaatatcccattttgaatgcatacctgtggtggttctgtccgggctaatccccatgctagaatgtcctttccagctacgtgaataagaagtcccatgcccgcatccaccggaagcagaagcctggtggatgcctggttcgttccgcagcaccagggcctccaccgtgctgtggcagcaccccccatgtcggtatttctaaataaccttatttatacctgcagagatacacttcagtcccattcagaagtcttctcttaaagcagcattacagtcccagacctgcgggtttctgagggcaacttgctggctgacagactcagtcttgacctcaaggaaggcccatacggcactgccgcatccacctagaggtgtttgctcttgtccgctgtctgagtactgtgattctcagatgagtttgctgcgttttgggaggacacagacggttctgtataggctagttcagtaacaacaaaatacactgttttgtcttccctcaaagagagatcttactagaacctgtaaatagaatgtattatttattataagtcactgcagctgatgaaaacagatggaggccatgctgcaggctgatactgatgggtggagttttgtcatcaggccagcctcatcccgaggtctcctccaccattggccgtagccagcaggcttcagtgctcaccgaaagtaaaatcccctccttcagcaagaataaagcaatatacaccttaggttccactaagtaacataggcataagcagggaacgtttcccccactgtgttccagtgcagaggagacgaagcctgtcctcaccgcggctcgctgggcccaggctggctctggaaagcctgtgcggtcctgggcaggaagcccggcccgtggagcaggttttcgttctgcttcagcaataaataagggtgaccacagggactttgcttttggtttcctttcctgtgaaaaggttggttttaaagtgagatacacttttccgtagaacaagtgttctatctttaaaaacccaaattgcagcaccgtggattactggtctcagaacaactcattgcgcatcagatttgactctctgattttctgtctattggccaaattgccctttaactgcacctgaatcctttgtgtactgatgcctttgagctgggcaccttgggagagtgttgtgttgctgtttacggttcttccttgcccttgctaattacagtctctggtgcccagcaagcccctttggcttccttccgtgactggtcacgttgtctgcctgggctcagcgtggacctgccccatgctgcagaacctggcctcacctggacttttcactagaattgccagcttcctcaacttagcagatcattcactcatgcgggcacaagcaaagatcaacactttcttttttggtaagcttgagttttacaagttattttttggtgatgcgtaagacattgcagtgggaaaccattcaacttgagtttattggagtttgctgttgtagcaggttttaactcaggaacaactcttgtctgatctctccgcccctctgccgggaggcgacattaactgtcctctcggagccggtagcgttgctgtccgagtccccaggacggatctcctgcagacctgccttaatgctcagatcgaagtatttcacaagaatacttgtgtttttaacagcccttcccctggacggtgcggccatgagggcctcatgttacggcattgccttttctttctgtggatccagtatcttcctcggctttttagggagcaggaaaaatgcgtctgagagcaactctttttaaaaacctgccctgttgtatataactgtgtctgtttcaccgtgtgacctcccaagggggtgggaacttgatataaacgtttaaaggggccacgatttgcccgagggttactcctttgctctcaccttgtatggatgaggagatgaagccatttcttatcctgtagatgtgaagcactttcagttttcagcgatgttggaatgtagcatcagaagctcgttccttcacactcagtggcgtctgtgcttgtccacatgcgctgggcgtctgggaccttgaatgcctgccctggttgtgtggactccttaatgccaatcatttcttcacttctctgggacacccagggcgcctgttgacaagtgtggagaaactcctaatttaaatgtcacagacaatgtcctagtgttgactactacaatgttgatgctacactgttgtaattattaaactgattatttttcttatgtcacaaaaaaaaaaa

SEQ ID NO: 257 - DNA, 3003 bp, Homo sapiens
  ref <308>: DATABASE ACCESSION NUMBER: NCBI / NM_003406
  ref <309>: DATABASE ENTRY DATE: 2011-12-24
  ref <313>: RELEVANT RESIDUES IN SEQ ID NO: (1)..(3003)
ctttctccttccccttcttccgggctcccgtcccggctcatcacccggcctgtggcccactcccaccgccagctggaaccctggggactacgacgtccctcaaaccttgcttctaggagataaaaagaacatccagtcatggataaaaatgagctggttcagaaggccaaactggccgagcaggctgagcgatatgatgacatggcagcctgcatgaagtctgtaactgagcaaggagctgaattatccaatgaggagaggaatcttctctcagttgcttataaaaatgttgtaggagcccgtaggtcatcttggagggtcgtctcaagtattgaacaaaagacggaaggtgctgagaaaaaacagcagatggctcgagaatacagagagaaaattgagacggagctaagagatatctgcaatgatgtactgtctcttttggaaaagttcttgatccccaatgcttcacaagcagagagcaaagtcttctatttgaaaatgaaaggagattactaccgttacttggctgaggttgccgctggtgatgacaagaaagggattgtcgatcagtcacaacaagcataccaagaagcttttgaaatcagcaaaaaggaaatgcaaccaacacatcctatcagactgggtctggcccttaacttctctgtgttctattatgagattctgaactccccagagaaagcctgctctcttgcaaagacagcttttgatgaagccattgctgaacttgatacattaagtgaagagtcatacaaagacagcacgctaataatgcaattactgagagacaacttgacattgtggacatcggatacccaaggagacgaagctgaagcaggagaaggaggggaaaattaaccggccttccaacttttgtctgcctcattctaaaatttacacagtagaccatttgtcatccatgctgtcccacaaatagttttttgtttacgatttatgacaggtttatgttacttctatttgaatttctatatttcccatgtggtttttatgtttaatattaggggagtagagccagttaacatttagggagttatctgttttcatcttgaggtggccaatatggggatgtggaatttttatacaagttataagtgtttggcatagtacttttggtacattgtggcttcaaaagggccagtgtaaaactgcttccatgtctaagcaaagaaaactgcctacatactggtttgtcctggcggggaataaaagggatcattggttccagtcacaggtgtagtaattgtgggtactttaaggtttggagcacttacaaggctgtggtagaatcataccccatggataccacatattaaaccatgtatatctgtggaatactcaatgtgtacacctttgactacagctgcagaagtgttcctttagacaaagttgtgacccattttactctggataagggcagaaacggttcacattccattatttgtaaagttacctgctgttagctttcattatttttgctacactcattttatttgtatttaaatgttttaggcaacctaagaacaaatgtaaaagtaaagatgcaggaaaaatgaattgcttggtattcattacttcatgtatatcaagcacagcagtaaaacaaaaacccatgtatttaacttttttttaggatttttgcttttgtgatttttttttttttgatacttgcctaacatgcatgtgctgtaaaaatagttaacagggaaataacttgagatgatggctagctttgtttaatgtcttatgaaattttcatgaacaatccaagcataattgttaagaacacgtgtattaaattcatgtaagtggaataaaagttttatgaatggacttttcaactactttctctacagcttttcatgtaaattagtcttggttctgaaacttctctaaaggaaattgtacattttttgaaatttattccttattccctcttggcagctaatgggctcttaccaagtttaaacacaaaatttatcataacaaaaatactactaatataactactgtttccatgtcccatgatcccctctcttcctccccaccctgaaaaaaatgagttcctattttttctgggagagggggggattgattagaaaaaaatgtagtgtgttccatttaaaattttggcatatggcattttctaacttaggaagccacaatgttcttggcccatcatgacattgggtagcattaactgtaagttttgtgcttccaaatcactttttggtttttaagaatttcttgatactcttatagcctgccttcaattttgatcctttattctttctatttgtcaggtgcacaagattaccttcctgttttagccttctgtcttgtcaccaaccattcttacttggtggccatgtacttggaaaaaggccgcatgatctttctggctccactcagtgtctaaggcaccctgcttcctttgcttgcatcccacagactatttccctcatcctatttactgcagcaaatctctccttagttgatgagactgtgtttatctccctttaaaaccctacctatcctgaatggtctgtcattgtctgcctttaaaatccttcctctttcttcctcctctattctctaaataatgatggggctaagttatacccaaagctcactttacaaaatatttcctcagtactttgcagaaaacaccaaacaaaaatgccattttaaaaaaggtgtattttttcttttagaatgtaagctcctcaagagcagggacaatgttttctgtatgttctattgtgcctagtacactgtaaatgctcaataaatattgatgatgggaggcagtgagtcttgatgataagggtgagaaactgaaatcccaaacactgttttgttgcttgttttattatgacctcagattaaattgggaaatattggcccttttgaataattgtcccaaatattacattcaaataaaagtgcaatggagaaaaaaaaaaa

SEQ ID NO: 258 - DNA, 3574 bp, Homo sapiens
  ref <308>: DATABASE ACCESSION NUMBER: NCBI / NM_002419
  ref <309>: DATABASE ENTRY DATE: 2011-12-18
  ref <313>: RELEVANT RESIDUES IN SEQ ID NO: (1)..(3574)
acaaagggaggaggaagaagggagcggggtcggagccgtcggggccaaaggagacggggccaggaacaggcagtctcggcccaactgcggacgctccctccaccccctgcgcaaaaagacccaaccggagttgaggcgctgcccctgaaggccccaccttacacttggcgggggccggagccaggctcccaggactgctccagaaccgagggaagctcgggtccctccaagctagccatggtgaggcgccggaggccccggggccccacccccccggcctgaccacactgccctgggtgccctcctccagaagcccgagatgcggggggccgggagacaacactcctggctccccagagaggcgtgggtctggggctgagggccagggcccggatgcccaggttccgggactagggccttggcagccagcgggggtggggaccacgggcacccagagaaggtcctccacacatcccagcgccggctcccggccatggagcccttgaagagcctcttcctcaagagccctctagggtcatggaatggcagtggcagcgggggtggtgggggcggtggaggaggccggcctgaggggtctccaaaggcagcgggttatgccaacccggtgtggacagccctgttcgactacgagcccagtgggcaggatgagctggccctgaggaagggtgaccgtgtggaggtgctgtcccgggacgcagccatctcaggagacgagggctggtgggcgggccaggtgggtggccaggtgggcatcttcccgtccaactatgtgtctcggggtggcggcccgcccccctgcgaggtggccagcttccaggagctgcggctggaggaggtgatcggcattggaggctttggcaaggtgtacaggggcagctggcgaggtgagctggtggctgtgaaggcagctcgccaggaccccgatgaggacatcagtgtgacagccgagagcgttcgccaggaggcccggctcttcgccatgctggcacaccccaacatcattgccctcaaggctgtgtgcctggaggagcccaacctgtgcctggtgatggagtatgcagccggtgggcccctcagccgagctctggccgggcggcgcgtgcctccccatgtgctggtcaactgggctgtgcagattgcccgtgggatgcactacctgcactgcgaggccctggtgcccgtcatccaccgtgatctcaagtccaacaacattttgctgctgcagcccattgagagtgacgacatggagcacaagaccctgaagatcaccgactttggcctggcccgagagtggcacaaaaccacacaaatgagtgccgcgggcacctacgcctggatggctcctgaggttatcaaggcctccaccttctctaagggcagtgacgtctggagttttggggtgctgctgtgggaactgctgaccggggaggtgccataccgtggcattgactgccttgctgtggcctatggcgtagctgttaacaagctcacactgcccatcccatccacctgccccgagcccttcgcacagcttatggccgactgctgggcgcaggacccccaccgcaggcccgacttcgcctccatcctgcagcagttggaggcgctggaggcacaggtcctacgggaaatgccgcgggactccttccattccatgcaggaaggctggaagcgcgagatccagggtctcttcgacgagctgcgagccaaggaaaaggaactactgagccgcgaggaggagctgacgcgagcggcgcgcgagcagcggtcacaggcggagcagctgcggcggcgcgagcacctgctggcccagtgggagctagaggtgttcgagcgcgagctgacgctgctgctgcagcaggtggaccgcgagcgaccgcacgtgcgccgccgccgcgggacattcaagcgcagcaagctccgggcgcgcgacggcggcgagcgtatcagcatgccactcgacttcaagcaccgcatcaccgtgcaggcctcacccggccttgaccggaggagaaacgtcttcgaggtcgggcctggggattcgcccacctttccccggttccgagccatccagttggagcctgcagagccaggccaggcatggggccgccagtccccccgacgtctggaggactcaagcaatggagagcggcgagcatgctgggcttggggtcccagttcccccaagcctggggaagcccagaatgggaggagaaggtcccgcatggacgaagccacatggtacctggattcagatgactcatcccccttaggatctccttccacacccccagcactcaatggtaaccccccgcggcctagcctggagcccgaggagcccaagaggcctgtccccgcagagcgcggtagcagctctgggacgcccaagctgatccagcgggcgctgctgcgcggcaccgccctgctcgcctcgctgggccttggccgcgacctgcagccgccgggaggcccaggacgcgagcgcggggagtccccgacaacaccccccacgccaacgcccgcgccctgcccgaccgagccgcccccttccccgctcatctgcttctcgctcaagacgcccgactccccgcccactcctgcacccctgttgctggacctgggtatccctgtgggccagcggtcagccaagagcccccgacgtgaggaggagccccgcggaggcactgtctcacccccaccggggacatcacgctctgctcctggcaccccaggcaccccacgttcaccacccctgggcctcatcagccgacctcggccctcgccccttcgcagccgcattgatccctggagctttgtgtcagctgggccacggccttctcccctgccatcaccacagcctgcaccccgccgagcaccctggaccttgttcccggactcagaccccttctgggactccccacctgccaaccccttccaggggggcccccaggactgcagggcacagaccaaagacatgggtgcccaggccccgtgggtgccggaagcggggccttgagtgggccaggccactcccccgagctccagctgccttaggaggagtcacagcatacactggaacaggagctgggtcagcctctgcagctgcctcagtttccccagggaccccacccccctttgggggtcaggaacactacactgcacaggaagccttcacactggaagggggacctgcgcccccacatctgaaacctgtaggtccccccagctcacctgccctactggggcccaacactgtacccagctggttgggaggaccagagcctgtctcagggaattgcctgctggggtgatgcagggaggaggggaggtgcagggaagaggggccggcctcagctgtcaccagcacttttgaccaagtcctgctactgcggcccctgccctagggcttagagcatggacctcctgccctgggggtcatctggggccagggctctctggatgccttcctgctgccccagccagggttggagtcttagcctcgggatccagtgaagccagaagccaaataaactcaaaagctgtctccccacaa

SEQ ID NO: 259 - DNA, 1687 bp, Homo sapiens
  ref <308>: DATABASE ACCESSION NUMBER: NCBI / NM_001130
  ref <309>: DATABASE ENTRY DATE: 2012-01-01
  ref <313>: RELEVANT RESIDUES IN SEQ ID NO: (1)..(1687)
cgggcgcgcggggagggggcgcaggaagcgggcgaggccgggcgcgggaggcggcggcggccccgggagctgccgatcggcgccgggacaaaggcgcggccgcccggcgcccccagcagcccgagccggggcgcacagccggggcgcagcccgcgccccccgccgcgattgacatgatgtttccacaaagcaggcattcgggctcctcgcacctaccccagcaactcaaattcaccacctcggactcctgcgaccgcatcaaagacgaatttcagctactgcaagctcagtaccacagcctcaagctcgaatgtgacaagttggccagtgagaagtcagagatgcagcgtcactatgtgatgtactacgagatgtcctacggcttgaacatcgagatgcacaaacaggctgagatcgtcaaaaggctgaacgggatttgtgcccaggtcctgccctacctctcccaagagcaccagcagcaggtcttgggagccattgagagggccaagcaggtcaccgctcccgagctgaactctatcatccgacagcagctccaagcccaccagctgtcccagctgcaggccctggccctgcccttgaccccactacccgtggggctgcagccgccttcgctgccggcggtcagcgcaggcaccggcctcctctcgctgtccgcgctgggttcccaggcccacctctccaaggaagacaagaacgggcacgatggtgacacccaccaggaggatgatggcgagaagtcggattagcagggggccgggacagggaggttgggaggggggacagaggggagacagaggcacggagagaaaggaatgtttagcacaagacacagcggagctcgggattggctaaactcccatagtatttatggtggccgccggcgggggccccagcccagcttgcaggccacctctagctttcttcctaccccattcccggcttccctcctcctcccctgcagcctggttaggtggatacctgccctgacatgtgaggcaagctaaggcctggagggtcagatgggagaccaggtcccaagggagcaagacctcgcgaagcgcagcagccccggcccttcccccgttttgaacatgtgtaaccgacagtctgcctgggccacagccctctcaccctggtactgcatgcacgcaatgctagctgcccctttcccgtcctgggcaccccgagtctcccccgaccccgggtcccaggtatgctcccacctccacctgccccactcaccacctctgctagttccagacacctccacgcccacctggtcctctcccatcgcccacaaaagggggggcacgagggacgagcttagctgagctgggaggagcagggtgagggtgggcgacccaggattccccctccccttcccaaataaagatgagggtactaaagttgtcttggtttttattttattattatttttttctttttccagtatactagcttgtcttttaagaaaggggatattaaaaaaaaaaaaagacaaaagtgtttttaaaaaaaagcaacacccacacctgtgtctgtatatagtcagcttatctcgtgttcaatcgtctgatctctacagagagaagtggaaaatgctgtatcaagggtgggcttagctgtgcctttccaataaagatgtgagaagcttcaaaaaaaaaaa

SEQ ID NO: 260 - DNA, 3172 bp, Homo sapiens
  ref <308>: DATABASE ACCESSION NUMBER: NCBI / NM_003379
  ref <309>: DATABASE ENTRY DATE: 2011-12-18
  ref <313>: RELEVANT RESIDUES IN SEQ ID NO: (1)..(3172)
agtgctgggcggggcgctgactcacccgggcccgggctggccggttcttaagcggcagcgcgctgcgggcgccgagtgtcgggcgcggcaggaggacgaggcagggcgggcgggcgctctaagggttctgctctgactccaggttgggacagcgtcttcgctgctgctggatagtcgtgttttcggggatcgaggatactcaccagaaaccgaaaatgccgaaaccaatcaatgtccgagttaccaccatggatgcagagctggagtttgcaatccagccaaatacaactggaaaacagctttttgatcaggtggtaaagactatcggcctccgggaagtgtggtactttggcctccactatgtggataataaaggatttcctacctggctgaagctggataagaaggtgtctgcccaggaggtcaggaaggagaatcccctccagttcaagttccgggccaagttctaccctgaagatgtggctgaggagctcatccaggacatcacccagaaacttttcttcctccaagtgaaggaaggaatccttagcgatgagatctactgcccccctgagactgccgtgctcttggggtcctacgctgtgcaggccaagtttggggactacaacaaagaagtgcacaagtctgggtacctcagctctgagcggctgatccctcaaagagtgatggaccagcacaaacttaccagggaccagtgggaggaccggatccaggtgtggcatgcggaacaccgtgggatgctcaaagataatgctatgttggaatacctgaagattgctcaggacctggaaatgtatggaatcaactatttcgagataaaaaacaagaaaggaacagacctttggcttggagttgatgcccttggactgaatatttatgagaaagatgataagttaaccccaaagattggctttccttggagtgaaatcaggaacatctctttcaatgacaaaaagtttgtcattaaacccatcgacaagaaggcacctgactttgtgttttatgccccacgtctgagaatcaacaagcggatcctgcagctctgcatgggcaaccatgagttgtatatgcgccgcaggaagcctgacaccatcgaggtgcagcagatgaaggcccaggcccgggaggagaagcatcagaagcagctggagcggcaacagctggaaacagagaagaaaaggagagaaaccgtggagagagagaaagagcagatgatgcgcgagaaggaggagttgatgctgcggctgcaggactatgaggagaagacaaagaaggcagagagagagctctcggagcagattcagagggccctgcagctggaggaggagaggaagcgggcacaggaggaggccgagcgcctagaggctgaccgtatggctgcactgcgggctaaggaggagctggagagacaggcggtggatcagataaagagccaggagcagctggctgcggagcttgcagaatacactgccaagattgccctcctggaagaggcgcggaggcgcaaggaggatgaagttgaagagtggcagcacagggccaaagaagcccaggatgacctggtgaagaccaaggaggagctgcacctggtgatgacagcacccccgcccccaccaccccccgtgtacgagccggtgagctaccatgtccaggagagcttgcaggatgagggcgcagagcccacgggctacagcgcggagctgtctagtgagggcatccgggatgaccgcaatgaggagaagcgcatcactgaggcagagaagaacgagcgtgtgcagcggcagctgctgacgctgagcagcgagctgtcccaggcccgagatgagaataagaggacccacaatgacatcatccacaacgagaacatgaggcaaggccgggacaagtacaagacgctgcggcagatccggcagggcaacaccaagcagcgcatcgacgagttcgaggccctgtaacagccaggccaggaccaagggcagaggggtgctcatagcgggcgctgccagccccgccacgcttgtgtctttagtgctccaagtctaggaactccctcagatcccagttcctttagaaagcagttacccaacagaaacattctgggctgggaaccagggaggcgccctggtttgttttccccagttgtaatagtgccaagcaggcctgattctcgcgattattctcgaatcacctcctgtgttgtgctgggagcaggactgattgaattacggaaaatgcctgtaaagtctgagtaagaaacttcatgctggcctgtgtgatacaagagtcagcatcattaaaggaaacgtggcaggacttccatctgtgccatacttgttctgtattcgaaatgagctcaaattgattttttaatttctatgaaggatccatctttgtatatttacatgcttagaggggtgaaaattattttggaaattgagtctgaagcactctcgcacacacagtgattccctcctcccgtcactccacgcagctggcagagagcacagtgatcaccagcgtgagtggtggaggaggacacttggatttttttttttgttttttttttttttgcttaacagttttagaatacattgtacttatacaccttattaatgatcagctatatactatttatatacaagtgataatacagatttgtaacattagttttaaaaagggaaagttttgttctgtatattttgttaccttttacagaataaaagaattacatatgaaaaaccctctaaaccatggcacttgatgtgatgtggcaggagggcagtggtggagctggacctgcctgctgcagtcacgtgtaaacaggattattattagtgttttatgcatgtaatggactatgcacacttttaattttgtcagattcacacatgccactatgagctttcagactccagctgtgaagagactctgtttgcttgtgtttgtttgtttgcagtctctctctgccatggccttggcaggctgctggaaggcagcttgtggaggccgttggttccgcccactcattccttctcgtgcactgctttctccttcacagctaagatgccatgtgcaggtggattccatgccgcagacatgaaataaaagctttgcaaaggcacgaagcaaaaaaaaaaaaaaaaaaaaaaaa

SEQ ID NO: 261 - DNA, 2206 bp, Homo sapiens
  ref <308>: DATABASE ACCESSION NUMBER: NCBI / NM_002636
  ref <309>: DATABASE ENTRY DATE: 2011-11-27
  ref <313>: RELEVANT RESIDUES IN SEQ ID NO: (1)..(2206)
ctccctcccccccgccgcctcctcctcctgccgctgccgctgctttggctgctgcgtcatacgccccagagccgccgggacggaggggctgggcctggggaccccccggcctccgcctgcacgcccccccacgcccggacgtgccctctccgcgcgggggactcgcctaggtctcctacgtctgcccctgcccggctcccggcggccccagctgtcaccggcccccccaggatgcaatggcgcagcccccccggctgagccgctctggtgcctcctcactttgggacccagcttctcctgctcccacctctggccccaggcctcggctttgggagggtcaagatgtgctggccagatggactgatgggctgctatacttgggtaccatcaaaaaggtggacagtgctagggaggtgtgtctggtccagtttgaggatgattcgcagtttctggttctatggaaagacattagccctgctgccctccctggagaggaactcctctgttgtgtctgtcgctctgagactgtggtccctgggaaccggctggtcagctgtgagaagtgtcgccatgcttatcaccaggactgccatgttcccagggctccagcccctggagagggagagggcacatcctgggtatgccgccagtgtgtctttgcgatcgccaccaagaggggaggtgccctgaagaagggcccctatgcccgggccatgctgggtatgaagctttctctgccatatggactgaaggggctggactgggatgctggacatctgagcaaccgacagcagagttactgttactgtggtggccctggggagtggaacctgaaaatgctgcagtgccggagctgcctgcagtggttccatgaggcctgcacccagtgtctgagcaagcccctcctctatggggacaggttctatgaatttgaatgctgtgtgtgtcgcgggggccctgagaaagtccggagactacagcttcgctgggtggatgtggcccatcttgtcctgtatcacctcagtgtttgctgtaagaagaaatactttgattttgatcgtgagatcctccccttcacttctgagaattgggacagtttgctcctgggggagctttcagacacccccaaaggagaacgttcttccaagctcctctctgctcttaacagccacaaggaccgtttcatttcagggagagagattaagaagaggaaatgtttgtttggtctccatgctcggatgcctccccctgtggagccccctactggagatggagcactcaccagggcagggccctgggggaggggtctcacgtcccctggggaagcgccggaggccggagccagagcccctgaggaggaggcagaaggggaaagtggaggagctggggccaccctcagcagtgcgcaatcagcccgagccccaggagcagagggagcgggctcatctgcagagggcactgcagcagccccatccggatgtttgcttccttccacccttctgccagcaccgcagggacctctggggacagtggacccccagacaggtcacccctggaacttcacattggtttccccacagacatccctaaaagtgccccccactcgatgactgcctcatcttcctcagtttcatccccatccccaggtcttcctagacgctcagcacccccttctcccctgtgccgtagtttgtctcctgggactgggggaggagtccgaggtggggttggttacctgtcccgaggggaccctgtccgggtccttgctcggagagtacggcctgatggctctgtgcagtacctggttgagtggggaggagggggcatcttctgaacagcctgcctctgcccagctccccattcacacacaccggcactttcataccctgacctctgacctcacctacagctgggatgtacctggagagatagggggtagttctccctactgcccaggctggaatccaagagtggggagtggggaagaggccctcttctctaccctccttcatgattcctgacccctcccatccttcccatttcctttgatgttattttgttacagctttttaaatattttttaaaattatttaacccctgggggcagagactgaggagggaggatgataagggatcccggactctgtatgattgaaataaagagaaataaacaaatctagcagctctgaaaaaaaaaaaaaaaaaa

SEQ ID NO: 262 - DNA, 1324 bp, Homo sapiens
  ref <308>: DATABASE ACCESSION NUMBER: NCBI / NM_002622
  ref <309>: DATABASE ENTRY DATE: 2011-11-28
  ref <313>: RELEVANT RESIDUES IN SEQ ID NO: (1)..(1324)
cccactgcgcaggcgcttacagtgcaccaagatggccgcccccgtggatctagagctgaagaaggccttcacagagcttcaagccaaagttattgacactcaacagaaggtgaagctcgcagacatacagattgaacagctaaacagaacgaaaaagcatgcacatcttacagatacagagatcatgactttggtagatgagactaacatgtatgaaggtgtaggaagaatgtttattcttcagtccaaggaagcaattcacagtcagctgttagagaagcagaaaatagcagaagaaaaaattaaagaactagaacagaaaaagtcctacctggagcgaagcgttaaggaagctgaggacaacatccgggagatgctgatggcacgaagggcccagtagggagcctctctgggaagctcttcctcctgcccctcccattcctggtgggggcagaggagtgtctgcagggaaacagcttctcctctgccccgatggatgctttatttggatggcctggcaacatcacattttctgcatcaccctgagccccatttgcttcccagccctggagtttttacccggctttgcctgccacctctgcccaggacactcttccctctcgggatgtgtgatgaactcccaggagagggaagatgggagccagggcaagataggaagctctgcctgagctttccactaggcacgccagccagaccaataaaaagcgtctgtcccactctgctaagcctggttttcttgagcagagggatggaacagagggtgagagaggcagtggccgtctccacctcagctcctgctccctctgcatcagagcccttcctttcttgggggatgggccttgccctcttctcttttcccttcctgtacctttgactaacgctcagcttccgggcctgcatgcagtagacagaagaggaagaaagaacagatgttcacagctgaatctcagtgaacagaatagcagtccctggatggcagtctgcctaaagattcctttccctgccttctcccatacattccaaaaggaagttcaacagtaagcagcacctccaagactgtctccttttggccaatatcataagatggacgccataatcctgaggcctcctagaggctgagggggcaacggtgtgatccagctggctcatcccagcccaggtgggccaattattcaattttcaagaattttgttgcaagccagttgtcaaacacagccattataattatgtaaatttgcaaattatgttaaaaacaaggacaataaatattcaaaatgcatccctaattactacatttgaccac

SEQ ID NO: 263 - DNA, 1475 bp, Homo sapiens
  ref <308>: DATABASE ACCESSION NUMBER: NCBI / NM_001823
  ref <309>: DATABASE ENTRY DATE: 2011-12-04
  ref <313>: RELEVANT RESIDUES IN SEQ ID NO: (1)..(1475)
aagagccgcgggagcgcggagcggccgctgttcgcctgcgtcgctccgggagctgccgacggacggagcgcccccgcccccgcccggccgcccgcccgccgccgccatgcccttctccaacagccacaacgcactgaagctgcgcttcccggccgaggacgagttccccgacctgagcgcccacaacaaccacatggccaaggtgctgacccccgagctgtacgcggagctgcgcgccaagagcacgccgagcggcttcacgctggacgacgtcatccagacaggcgtggacaacccgggccacccgtacatcatgaccgtgggctgcgtggcgggcgacgaggagtcctacgaagtgttcaaggatctcttcgaccccatcatcgaggaccggcacggcggctacaagcccagcgatgagcacaagaccgacctcaaccccgacaacctgcagggcggcgacgacctggaccccaactacgtgctgagctcgcgggtgcgcacgggccgcagcatccgtggcttctgcctccccccgcactgcagccgcggggagcgccgcgccatcgagaagctcgcggtggaagccctgtccagcctggacggcgacctggcgggccgatactacgcgctcaagagcatgacggaggcggagcagcagcagctcatcgacgaccacttcctcttcgacaagcccgtgtcgcccctgctgctggcctcgggcatggcccgcgactggcccgacgcccgcggtatctggcacaatgacaataagaccttcctggtgtgggtcaacgaggaggaccacctgcgggtcatctccatgcagaaggggggcaacatgaaggaggtgttcacccgcttctgcaccggcctcacccagattgaaactctcttcaagtctaaggactatgagttcatgtggaaccctcacctgggctacatcctcacctgcccatccaacctgggcaccgggctgcgggcaggtgtgcatatcaagctgcccaacctgggcaagcatgagaagttctcggaggtgcttaagcggctgcgacttcagaagcgaggcacaggcggtgtggacacggctgcggtgggcggggtcttcgacgtctccaacgctgaccgcctgggcttctcagaggtggagctggtgcagatggtggtggacggagtgaagctgctcatcgagatggagcagcggctggagcagggccaggccatcgacgacctcatgcctgcccagaaatgaagcccggcccacacccgacaccagccctgctgcttcctaacttattgcctgggcagtgcccaccatgcacccctgatgttcgccgtctggcgagcccttagccttgctgtagagacttccgtcacccttggtagagtttatttttttgatggctaagatactgctgatgctgaaataaactagggttttggcctgcctgcgtctgaaaaaaaaaaaaaaaaaa

SEQ ID NO: 264 - DNA, 1807 bp, Homo sapiens
  ref <308>: DATABASE ACCESSION NUMBER: NCBI / NM_003405
  ref <309>: DATABASE ENTRY DATE: 2011-11-20
  ref <313>: RELEVANT RESIDUES IN SEQ ID NO: (1)..(1807)
gcggccgcgtctcctccctcggcgttgtccgcggcgcgagccacagcgcgcggggcgagccagcgagagggcgcgagcggcggcgctgcctgcagcctgcagcctgcagcctccggccggccggcgagccagtgcgcgtgcgcggcggcggcctccgcagcgaccggggagcggactgaccggcgggagggctagcgagccagcggtgtgaggcgcgaggcgaggccgagccgcgagcgacatgggggaccgggagcagctgctgcagcgggcgcggctggccgagcaggcggagcgctacgacgacatggcctccgctatgaaggcggtgacagagctgaatgaacctctctccaatgaagatcgaaatctcctctctgtggcctacaagaatgtggttggtgccaggcgatcttcctggagggtcattagcagcattgagcagaaaaccatggctgatggaaacgaaaagaaattggagaaagttaaagcttaccgggagaagattgagaaggagctggagacagtttgcaatgatgtcctgtctctgcttgacaagttcctgatcaagaactgcaatgatttccagtatgagagcaaggtgttttacctgaaaatgaagggtgattactaccgctacttagcagaggtcgcttctggggagaagaaaaacagtgtggtcgaagcttctgaagctgcctacaaggaagcctttgaaatcagcaaagagcagatgcaacccacgcatcccatccggctgggcctggccctcaacttctccgtgttctactatgagatccagaatgcacctgagcaagcctgcctcttagccaaacaagccttcgatgatgccatagctgagctggacacactaaacgaggattcctataaggactccacgctgatcatgcagttgctgcgagacaacctcaccctctggacgagcgaccagcaggatgaagaagcaggagaaggcaactgaagatccttcaggtcccctggcccttccttcacccaccacccccatcatcaccgattcttccttgccacaatcactaaatatctagtgctaaacctatctgtattggcagcacagctactcagatctgcactcctgtctcttgggaagcagtttcagataaatcatgggcattgctggactgatggttgctttgagcccacaggagctccctttttgaattgtgtggagaagtgtgttctgatgaggcattttactatgcctgttgatctatgggaaatctaggcgaaagtaatggggaagattagaaagaattagccaaccaggctacagttgatatttaaaagatccatttaaaacaagctgatagtgtttcgttaagcagtacatcttgtgcatgcaaaaatgaattcacccctcccacctctttcttcaattaatggaaaactgttaagggaagctgatacagagagacaacttgctcctttccatcagctttataataaactgtttaacgtgaggtttcagtagctccttggttttgcctctttaaattatgacgtgcacaaaccttcttttcaatgcaatgcatctgaaagttttgatacttgtaacttttttttttttttggttgcaattgtttaagaatcatggatttattttttgtaactctttggctattgtccttgtgtatcctgacagcgccatgtgtgtcagcccatgtcaatcaagatgggtgattatgaaatgccagacttctaaaataaatgttttggaattcaatgggtaaataaatgctgctttggggatattaaaaaaaaaaaaaaa

SEQ ID NO: 265 - DNA, 2057 bp, Homo sapiens
  ref <308>: DATABASE ACCESSION NUMBER: NCBI / NM_002939
  ref <309>: DATABASE ENTRY DATE: 2011-12-04
  ref <313>: RELEVANT RESIDUES IN SEQ ID NO: (1)..(2057)
ggctgcgcctgcgtggttcgtcctcacgtggccgtcaagccctctagtgccttagattccagcgagctacgcaagcaatcctggcccagccgagcttgcttccccaaatcccgtaatccttgaccttattcccccaaagaagcggcctcccgggaaggagcgccctggcggagaagactcgaacggctcccacagccgggcgttgggggaaaggcatgaagaactcttgactgacagaaacggagggtgtgtccaaagttttgaggacggccgagcggcgctccaaaacccgtcctcacagcctcgccccgttcgcctcagctacaacaaatcatcgtcaacctgttccaccttctccagtctggtagcaaaaaggggtgtctcagaatctccggcctgtgaaactgtgaggggattcggccaagacgtcctcttccctctgcctcccacccaggccactcttcacctccaccatgagcctggacatccagagcctggacatccagtgtgaggagctgagcgacgctagatgggccgagctcctccctctgctccagcagtgccaagtggtcaggctggacgactgtggcctcacggaagcacggtgcaaggacatcagctctgcacttcgagtcaaccctgcactggcagagctcaacctgcgcagcaacgagctgggcgatgtcggcgtgcattgcgtgctccagggcctgcagaccccctcctgcaagatccagaagctgagcctccagaactgctgcctgacgggggccggctgcggggtcctgtccagcacactacgcaccctgcccaccctgcaggagctgcacctcagcgacaacctcttgggggatgcgggcctgcagctgctctgcgaaggactcctggacccccagtgccgcctggaaaagctgcagctggagtattgcagcctctcggctgccagctgcgagcccctggcctccgtgctcagggccaagccggacttcaaggagctcacggttagcaacaacgacatcaatgaggctggcgtccgtgtgctgtgccagggcctgaaggactccccctgccagctggaggcgctcaagctggagagctgcggtgtgacatcagacaactgccgggacctgtgcggcattgtggcctccaaggcctcgctgcgggagctggccctgggcagcaacaagctgggtgatgtgggcatggcggagctgtgcccagggctgctccaccccagctccaggctcaggaccctgtggatctgggagtgtggcatcactgccaagggctgcggggatctgtgccgtgtcctcagggccaaggagagcctgaaggagctcagcctggccggcaacgagctgggggatgagggtgcccgactgctgtgtgagaccctgctggaacctggctgccagctggagtcgctgtgggtgaagtcctgcagcttcacagccgcctgctgctcccacttcagctcagtgctggcccagaacaggtttctcctggagctacagataagcaacaacaggctggaggatgcgggcgtgcgggagctgtgccagggcctgggccagcctggctctgtgctgcgggtgctctggttggccgactgcgatgtgagtgacagcagctgcagcagcctcgccgcaaccctgttggccaaccacagcctgcgtgagctggacctcagcaacaactgcctgggggacgccggcatcctgcagctggtggagagcgtccggcagccgggctgcctcctggagcagctggtcctgtacgacatttactggtctgaggagatggaggaccggctgcaggccctggagaaggacaagccatccctgagggtcatctcctgaggctcttcctgctgctgctctccctggacgaccggcctcgaggcaaccctggggcccaccagcccctgccatgctctcaccctgcatatcctaggtttgaagagaaacgctcagatccgcttatttctgccagtatattttggacactttataatcattaaagcactttcttggcaggaaaaaaaaaaaaaaaaaaaa

SEQ ID NO: 266 - DNA, 1822 bp, Homo sapiens
  ref <308>: DATABASE ACCESSION NUMBER: NCBI / NM_003562
  ref <309>: DATABASE ENTRY DATE: 2011-11-27
  ref <313>: RELEVANT RESIDUES IN SEQ ID NO: (1)..(1822)
acagcgcctttcctctggtttccaaatcagttacgccccttctcgcacgcttccatcaagctcctccttcagctccgccttactcccggccgcctttgcgctgcgcgcctgcgcccgcgccggcttccagcgggtgtcggacctgagagctggaggggcgtgcgcgcgccctcgctctgttgcgcgcgcggtgtcaccttgggcgcgagcggggccgcgcgcgcacgggacccggagccgagggccattgagtggcgatggcggcgacggcgagtgccggggccggcgggatagacgggaagccccgtacctcccctaagtccgtcaagttcctgtttgggggcctggccgggatgggagctacagtttttgtccagcccctggacctggtgaagaaccggatgcagttgagcggggaaggggccaagactcgagagtacaaaaccagcttccatgccctcaccagtatcctgaaggcagaaggcctgaggggcatttacactgggctgtcggctggcctgctgcgtcaggccacctacaccactacccgccttggcatctataccgtgctgtttgagcgcctgactggggctgatggtactccccctggctttctgctgaaggctgtgattggcatgaccgcaggtgccactggtgcctttgtgggaacaccagccgaagtggctcttatccgcatgactgccgatggccggcttccagctgaccagcgccgtggctacaaaaatgtgtttaacgccctgattcgaatcacccgggaagagggtgtcctcacactgtggcggggctgcatccctaccatggctcgggccgtcgtcgtcaatgctgcccagctcgcctcctactcccaatccaagcagttcttactggactcaggctacttctctgacaacatcttgtgccacttctgtgccagcatgatcagcggtcttgtcaccactgctgcctccatgcctgtggacattgccaagacccgaatccagaacatgcggatgattgatgggaagccggaatacaagaacgggctggacgtgctgttcaaagttgtccgctacgagggcttcttcagcctgtggaagggcttcacgccgtactatgcccgcctgggcccccacaccgtcctcaccttcatcttcttggagcagatgaacaaggcctacaagcgtctcttcctcagtggctgaagcggccgggggctcccactcgcctgctgcgcctatagccactgcgccctgggggcctgggctctgctgccctggacccctctatttatttcccttccacagtgtggtttcttcctctgcggtaaaggacttggtctgttctaccccctgctccagcttgccctgctcgtcctgatcctgtgatttctctgtccttggctattcttgcagggagctggaaaacttctgaggatttctggcctccccctgggttttagtttcagggcacacaggacagcagaagatcccctttgtcagtggggaaaccaaggcagagctgaggggacagggaggagcagaagccatcaagatggtcaaagggcctgcagagggagatgtggcccttcctccccctcattgaggacttaataaattggattgatgacaccagccccaaatctggagagtctggggggtggctaggagaggggaggagactggacaaagaagctggagaataggaactggagtttttaagaaaaattgttaaagaaaaagcagccgctggttttttgcaaatgctgtataaatctgtcatgccacagcagctgacagggccagaaaaactcaaaaaaaaaaaa

SEQ ID NO: 267 - DNA, 1235 bp, Homo sapiens
  ref <308>: DATABASE ACCESSION NUMBER: NCBI / NM_001916
  ref <309>: DATABASE ENTRY DATE: 2011-03-12
  ref <313>: RELEVANT RESIDUES IN SEQ ID NO: (1)..(1235)
cccaggggccgacgggagtggcggccgcgcggaggaggccaagatggcggcagctgcggcttcgcttcgcggggtagtgttgggcccgcggggcgcggggctcccgggcgcgcgtgcccggggtctgctgtgcagcgcgcgtcccgggcagctcccgctacggacacctcaggcagtggccttgtcgtcgaagtctggcctttcccgaggccggaaagtgatgctgtcagcgctgggcatgctggcggcagggggtgcggggctggccgtggctctgcattcggctgtgagtgccagtgacctggagctgcacccccccagctatccgtggtctcaccgtggcctcctctcttccttggaccacaccagcatccggaggggtttccaggtatataagcaggtgtgcgcctcctgccacagcatggacttcgtggcctaccgccacctggtgggcgtgtgctacacggaggatgaagctaaggagctggctgcggaggtggaggttcaagacggccccaatgaagatggggagatgttcatgcggccagggaagctgttcgactatttcccaaaaccataccccaacagtgaggctgctcgagctgccaacaacggagcattgccccctgacctcagctacatcgtgcgagctaggcatggtggtgaggactacgtcttctccctgctcacgggctactgcgagccacccaccggggtgtcactgcgggaaggtctctacttcaacccctactttcctggccaggccattgccatggcccctcccatctacacagatgtcttagagtttgacgatggcaccccagctaccatgtcccagatagccaaggatgtgtgcaccttcctgcgctgggcatctgagccagagcacgaccatcgaaaacgcatggggctcaagatgttgatgatgatggctctgctggtgcccctggtctacaccataaagcggcacaagtggtcagtcctgaagagtcggaagctggcatatcggccgcccaagtgaccctgtccagtgtctgcttgccatcctgccagaacaggccctcaagcccaagagccatcccaggcctgttcaggcctcagctaagcctctcttcatctggaagaagaggcaagggggcaggagaccaggctctagctctgggccctccttcagcccccatcatgggaataaattaattttctcaatgtaaaaaaaaaaaaaaaaaaaaaaaaaa

SEQ ID NO: 268 - DNA, 1220 bp, Homo sapiens
  ref <308>: DATABASE ACCESSION NUMBER: NCBI / NM_002823
  ref <309>: DATABASE ENTRY DATE: 2011-11-26
  ref <313>: RELEVANT RESIDUES IN SEQ ID NO: (1)..(1220)
cccccactggctgctctgaaaagccatctttgcattgttcctcatccgcctccttgctcgccgcagccgcctccgccgcgcgcctcctccgccgccgcggactccggcagctttatcgccagagtccctgaactctcgctttctttttaatcccctgcatcggatcaccggcgtgccccaccatgtcagacgcagccgtagacaccagctccgaaatcaccaccaaggacttaaaggagaagaaggaagttgtggaagaggcagaaaatggaagagacgcccctgctaacgggaatgctaatgaggaaaatggggagcaggaggctgacaatgaggtagacgaagaagaggaagaaggtggggaggaagaggaggaggaagaagaaggtgatggtgaggaagaggatggagatgaagatgaggaagctgagtcagctacgggcaagcgggcagctgaagatgatgaggatgacgatgtcgataccaagaagcagaagaccgacgaggatgactagacagcaaaaaaggaaaagttaaactaaaaaaaaaaaggccgccgtgacctattcaccctccacttcccgtctcagaatctaaacgtggtcaccttcgagtagagaggcccgcccgcccaccgtgggcagtgccacccgcagatgacacgcgctctccaccacccaacccaaaccatgagaatttgcaacaggggaggaaaaaagaaccaaaacttccaaggccctgctttttttcttaaaagtactttaaaaaggaaatttgtttgtattttttatttacattttatatttttgtacatattgttagggtcagccatttttaatgatctcggatgaccaaaccagccttcggagcgttctctgtcctacttctgactttacttgtggtgtgaccatgttcattataatctcaaaggagaaaaaaaaccttgtaaaaaaagcaaaaatgacaacagaaaaacaatcttattccgagcattccagtaacttttttgtgtatgtacttagctgtactataagtagttggtttgtatgagatggttaaaaaggccaaagataaaaggtttctttttttttccttttttgtctatgaagttgctgtttattttttttggcctgtttgatgtatgtgtgaaacaatgttgtccaacaataaacaggaattttattttgctgagttgttctaacaaaaaaaaaaaaaaaaaa

SEQ ID NO: 269 - DNA, 606 bp, Homo sapiens
  ref <308>: DATABASE ACCESSION NUMBER: NCBI / NM_003096
  ref <309>: DATABASE ENTRY DATE: 2011-11-20
  ref <313>: RELEVANT RESIDUES IN SEQ ID NO: (1)..(606)
agacgcaagacgccgggcctacagcgggagcgtgaggaaagccgtgcgttgcgttccaaggcatctgtgagcccgcggagtatacaccatgagcaaagctcaccctcccgagttgaaaaaatttatggacaagaagttatcattgaaattaaatggtggcagacatgtccaaggaatattgcggggatttgatccctttatgaaccttgtgatagatgaatgtgtggagatggcgactagtggacaacagaacaatattggaatggtggtaatacgaggaaatagtatcatcatgttagaagccttggaacgagtataaataatggctgttcagcagagaaacccatgtcctctctccatagggcctgttttactatgatgtaaaaattaggtcatgtacattttcatattagactttttgttaaataaacttttgtaatagtcaaaaatgctttctcagatgttctgaatatagaatatcagctctcattccagttttttctaacatgaattttcctggttgacattgatttcaaagggttttatgcattaaagtgaaagaatcttattaaatgcgaaaaaaaaaaaaaaaaaaaaaaaaaaaaa

SEQ ID NO: 270 - DNA, 2089 bp, Homo sapiens
  ref <308>: DATABASE ACCESSION NUMBER: NCBI / NM_003321
  ref <309>: DATABASE ENTRY DATE: 2011-11-26
  ref <313>: RELEVANT RESIDUES IN SEQ ID NO: (1)..(2089)
agacactggcggctagaggggcccggacttgccctcccagctctaacttccgccggaagtgccttccagccgcaggcgcccttcttcttctgtgcgctcgggctcctggtcccggctccccggttaccggggcgcgagtatgaccacaatggcggccgccaccctgctgcgcgcgacgccccacttcagcggtctcgccgccggccggaccttcctgctgcagggtctgttgcggctgctgaaagccccggcattgcctctcttgtgccgcggcctggccgtggaggccaagaagacttacgtgcgcgacaagccacatgtgaatgtgggtaccatcggccatgtggaccacgggaagaccacgctgactgcagccatcacgaagattctagctgagggaggtggggctaagttcaagaagtacgaggagattgacaatgccccggaggagcgagctcggggtatcaccatcaatgcggctcatgtggagtatagcactgccgcccgccactacgcccacacagactgcccgggtcatgcagattatgttaagaatatgatcacaggcactgcacccctcgacggctgcatcctggtggtagcagccaatgacggccccatgccccagacccgagagcacttattactggccagacagattggggtggagcatgtggtggtgtatgtgaacaaggctgacgctgtccaggactctgagatggtggaactggtggaactggagatccgggagctgctcaccgagtttggctataaaggggaggagaccccagtcatcgtaggctctgctctctgtgcccttgagggtcgggaccctgagttaggcctgaagtctgtgcagaagctactggatgctgtggacacttacatcccagtgcccgcccgggacctggagaagcctttcctgctgcctgtggaggcggtgtactccgtccctggccgtggcaccgtggtgacaggtacactagagcgtggcattttaaagaagggagacgagtgtgagctcctaggacatagcaagaacatccgcactgtggtgacaggcattgagatgttccacaagagcctggagagggccgaggccggagataacctcggggccctggtccgaggcttgaagcgggaggacttgcggcggggcctggtcatggtcaagccaggttccatcaagccccaccagaaggtggaggcccaggtttacatcctcagcaaggaggaaggtggccgccacaagccctttgtgtcccacttcatgcctgtcatgttctccctgacttgggacatggcctgtcggattatcctgcccccagagaaggagcttgccatgcccggggaggacctgaagttcaacctaatcttgcggcagccaatgatcttagagaaaggccagcgtttcaccctgcgagatggcaaccggactattggcaccggtctagtcaccaacacgctggccatgactgaggaggagaagaatatcaaatggggttgagtgtgcagatctctgctcagcttcccttgcgtttaaggcctgccctagccagggctccctcctgcttccagtaccctctcatggcataggctgcaacccagcagagggcagctagatggacatttcccctgctcggaagggttggcctgcctggctggggaggtcagtaaactttgaatagtaagccagcctgtgtcctgtgtcctttgtgcaaattggagaggataggggaggacaaaaagggtgttgaaccccagacagatggggagcttgtgagatcccagagcagttttaacggataaatcaagtccagtgagcttagtgattgcctagacacagtaggatgccgttattcagcctcctgggagatagtgggaaagaatgttctatcgctctggagccagcatggcttcagctcaggtgccaaacccatcttgtttcctcggaatactaagtgaatgtctagcatccattcacattctgtgggaacagggactggacaggcatacctcagatgctgtaggtttgcttccagactaccacaataaagcaggtcacaaatttaaaaaaaaaaaaaaaaaa

SEQ ID NO: 271 - DNA, 3110 bp, Homo sapiens
  ref <308>: DATABASE ACCESSION NUMBER: NCBI / NM_003404
  ref <309>: DATABASE ENTRY DATE: 2011-12-25
  ref <313>: RELEVANT RESIDUES IN SEQ ID NO: (1)..(3110)
gcggaagtggagctaccgccaccgccgccgccgattccggagccggggtagtcgccgccgccgccgccgctgcagccactgcaggcaccgctgccgccgcctgagtagtgggcttaggaaggaagaggtcatctcgctcggagcttcgctcggaagggtctttgttccctgcagccctcccacggcagagtctccagagatttgggccgctacaaaaagtgcattttgcccattcggctgtggatagagaagcaggaagagcactggacttggagtcagggaatgacaatggataaaagtgagctggtacagaaagccaaactcgctgagcaggctgagcgatatgatgatatggctgcagccatgaaggcagtcacagaacaggggcatgaactctccaacgaagagagaaatctgctctctgttgcctacaagaatgtggtaggcgcccgccgctcttcctggcgtgtcatctccagcattgagcagaaaacagagaggaatgagaagaagcagcagatgggcaaagagtaccgtgagaagatagaggcagaactgcaggacatctgcaatgatgttctggagctgttggacaaatatcttattcccaatgctacacaaccagaaagtaaggtgttctacttgaaaatgaaaggagattattttaggtatctttctgaagtggcatctggagacaacaaacaaaccactgtgtcgaactcccagcaggcttaccaggaagcatttgaaattagtaagaaagaaatgcagcctacacacccaattcgtcttggtctggcactaaatttctcagtcttttactatgagattctaaactctcctgaaaaggcctgtagcctggcaaaaacggcatttgatgaagcaattgctgaattggatacgctgaatgaagagtcttataaagacagcactctgatcatgcagttacttagggacaatctcactctgtggacatcggaaaaccagggagacgaaggagacgctggggagggagagaactaatgtttctcgtgctttgtgatctgttcagtgtcactctgtaccctcaacatatatcccttgtgcgataaaaaaaaaaaaaaaaaaaaaaagagaatcgtacgtcgactttcgatttttcacagcctcagcctaggaaaaatggttcatgggataaacagctggtatttgtatctaaaactcagattggtcacataaatgccacggcattccgaagttttgattttgattaacattgacaggattactgtgtgtttaattttttaaaaactgaacactgtgattatggggttttgtaatttagcagaactcttactggtagaaaaaatagacctgaattatgtgtaactttttggaaggtttaatctgatatcaaaataatcattgaaatacaattccattgtaaagttgtacagaaagttatagagattatattgtgatgctggaacttggagtgagacacacatcatttggcatttgagttgaatggtaattcacagtaatgctgccgttgttcgggacttaaagacacttgacctgtttgggctgttgccacttaaaagttcatgaccacaaatgtccacagtgtcttcctctgaggaaactcgaatcctgaaatggaaattctttgtggcagataactggcttatgacaccttgaaaagttcaagtgctcatataacacaccacactgaaccccctttcctacagcaatatgttcactatgttaccaatttgcaacttgtgcttcaatagtggaatctactttcattgttaacactgagctaaagaaaaaaagccgtgtgttttatgaatgaccttatctgtttcctggataatacctttaagaataatgtcctgagtcaggcgtggtggtgcgtgcatctagtcccaactatttgggaggctgaggcaggaggatcgcttgagcccaggagtttaaagctgcagtgccctgtggttgcacctgtgaataactgcactccagcctgggcaacatagcgagacctcatctccaaaaaagaaaacaaaaaacaaaaaaaggaatgatgttctgtagagatggcctttcacttgaggagtactcagttttcaggttcttcctagctcggggcttttaaattttgaaatctaaacattctttcccaccatcctttttgactgttgaccttggttttctcttctaagtttctgtccctctgcttccttactttttttcctttttgaattctatctttatctgtcttttgttcactttttaatgctatatatgggcaggggtgagagacattactgagcaccttggtgagcaagcctggctttaaagattggagaagagcttctggcaccagaaccctgtcttcctccagttctcaacacggtgttgctcttcagtcataccggaatctgaatcaaaaaagtatttttaaatatccatgatttctccctgtattgaggctagccctgatcatgctttttgtgcctgtcaccaggtctcccaagtgcactcatccaggtcagtgctcagatgtgtttaaggagaccctatattcagggaagttgcgtgaacactgcagtggggagaattgagaatagtcaggcctatcagtctcacagaatcacccctctacctttgatattccacttagctgtagagtccatctgtttgtccatctgctgaaatgagaaaagaaaaatttatgcactgatttaaaacaaaccaaaaaaaaagaaaaaaacaaaaaaaaaaatccctcctttctagctgaacaaaaatgtgcagttaatacttggcgcttgaaaatgcagtagtgaatgtggaaccaagcctgtctgtatatctggtagctcttttcttgctttgttttttcttaccagtattctgcctaacgtttgcttctgtgatggttatattgcctagcaagcacacccgtggttgtgaaaatagtatagcaaaaaagaaaaatccccggttattgatgtactagatttgtgtatgtcttttaaacagttctagtttcaccttacacagaataatcaggaaaagtgtaaaaattcaaaagtgaaataaaaattttatcagttaaaaaa

SEQ ID NO: 272 - DNA, 1741 bp, Homo sapiens
  ref <308>: DATABASE ACCESSION NUMBER: NCBI / NM_002946
  ref <309>: DATABASE ENTRY DATE: 2011-11-13
  ref <313>: RELEVANT RESIDUES IN SEQ ID NO: (1)..(1741)
cttcgtaaagatggccgcggaggcttttggagccaactgggagcgcagtacgcgttttctggagcatgggcagaggagacaggaacaagcgtagcatccgtgagcaccgattggctgaagcgagcaccccgggagctgactggctccgccattcgcgggaaggcgtttgtggtgccagagaaaagtagccagagcggcgcagtggcggccgcgttctgtggttttccgctattcccccagacccgcaccttctcggcctctttgcggagaatcgtgaccaagatgtggaacagtggattcgaaagctatggcagctcctcatacgggggagccggcggctacacgcagtccccggggggctttggatcgcccgcaccttctcaagccgaaaagaaatcaagagcccgagcccagcacattgtgccctgtactatatctcagctgctttctgccactttggttgatgaagtgttcagaattgggaatgttgagatttcacaggtcactattgtggggatcatcagacatgcagagaaggctccaaccaacattgtttacaaaatagatgacatgacagctgcacccatggacgttcgccagtgggttgacacagatgacaccagcagtgaaaacactgtggttcctccagaaacatatgtgaaagtggcaggccacctgagatcttttcagaacaaaaagagcctggtagcctttaagatcatgcccctggaggatatgaatgagttcaccacacatattctggaagtgatcaatgcacacatggtactaagcaaagccaacagccagccctcagcagggagagcacctatcagcaatccaggaatgagtgaagcagggaactttggtgggaatagcttcatgccagcaaatggcctcactgtggcccaaaaccaggtgttgaatttgattaaggcttgtccaagacctgaagggttgaactttcaggatctcaagaaccagctgaaacacatgtctgtatcctcaatcaagcaagctgtggattttctgagcaatgaggggcacatctattctactgtggatgatgaccattttaaatccacagatgcagaataactggatctaactgggtacctgagatattttacagctggacctagtttcacaatctgttgtctccagctctgcatatgtctggccagggggcttctaggaagtaggtttcatctatcaaatgtctcctctgacttccttttgaaacttactgctcttctgttttattttgttttgtttgaagctcagagggagatgggcaattgacagggatgcaatccagggtgggatttcttgaggaagttacaaataagcttgttacaacatcaagatagatggaattggaaggatgctaccaggagagtacttacatagtgctcaggagtttctcttcttaaaatgtttactgctgaaagatgagcaggaccagggcgttataggcagagccctagccgagaaacctgctggcctctgcctgttttcatttcccactttggttgtgtggcattactttcagaattgcactttcctgcttgtcatgactttttgacacacttgccatgacgtgtgtttctgtgaacatgaagttctgcggtagtgcctccaggggcagaggaaaagaagaagtgttactgcgttttgtacaaaataaatacagtcatatgtttaataaaacagttctattgtaaaaaaaaaaaaaaaaaaaaaa

SEQ ID NO: 273 - DNA, 1497 bp, Homo sapiens
  ref <308>: DATABASE ACCESSION NUMBER: NCBI / NM_004356
  ref <309>: DATABASE ENTRY DATE: 2011-12-18
  ref <313>: RELEVANT RESIDUES IN SEQ ID NO: (1)..(1497)
gagcgagcgcgcaacggcggcgacggcggcgaccccaccgcgcatcctgccaggcctccggcgcccagcgccccacgcgcccccgcgcccccgcgcccccgcgcccctttcttcgcgcccccgcccctcggcccgccaggcccccttgccggccacccgccaggccccgcgccggcccgcccgccgcccaggaccggcccgcgccccgcaggccgcccgccgcccgcgccgccatgggagtggagggctgcaccaagtgcatcaagtacctgctcttcgtcttcaatttcgtcttctggctggctggaggcgtgatcctgggtgtggccctgtggctccgccatgacccgcagaccaccaacctcctgtatctggagctgggagacaagcccgcgcccaacaccttctatgtaggcatctacatcctcatcgctgtgggcgctgtcatgatgttcgttggcttcctgggctgctacggggccatccaggaatcccagtgcctgctggggacgttcttcacctgcctggtcatcctgtttgcctgtgaggtggccgccggcatctggggctttgtcaacaaggaccagatcgccaaggatgtgaagcagttctatgaccaggccctacagcaggccgtggtggatgatgacgccaacaacgccaaggctgtggtgaagaccttccacgagacgcttgactgctgtggctccagcacactgactgctttgaccacctcagtgctcaagaacaatttgtgtccctcgggcagcaacatcatcagcaacctcttcaaggaggactgccaccagaagatcgatgacctcttctccgggaagctgtacctcatcggcattgctgccatcgtggtcgctgtgatcatgatcttcgagatgatcctgagcatggtgctgtgctgtggcatccggaacagctccgtgtactgaggccccgcagctctggccacagggacctctgcagtgccccctaagtgacccggacacttccgagggggccatcaccgcctgtgtatataacgtttccggtattactctgctacacgtagcctttttacttttggggttttgtttttgttctgaactttcctgttaccttttcagggctgacgtcacatgtaggtggcgtgtatgagtggagacgggcctgggtcttggggactggagggcaggggtccttctgccctggggtcccagggtgctctgcctgctcagccaggcctctcctgggagccactcgcccagagactcagcttggccaacttggggggctgtgtccacccagcccgcccgtcctgtgggctgcacagctcaccttgttccctcctgccccggttcgagagccgagtctgtgggcactctctgccttcatgcacctgtcctttctaacacgtcgccttcaactgtaatcacaacatcctgactccgtcatttaataaagaaggaacatcaggcatgctaccaggcctgtgcagtccctcag

SEQ ID NO: 274 - DNA, 1309 bp, Homo sapiens
  ref <308>: DATABASE ACCESSION NUMBER: NCBI / NM_001743
  ref <309>: DATABASE ENTRY DATE: 2011-12-24
  ref <313>: RELEVANT RESIDUES IN SEQ ID NO: (1)..(1309)
ctcgtttgcgatgttccgttatctggatgcggcggagggatctggcggagggaggtgtttatgaggcgctgggggcggaggaggcgaattagtccgagtggagagagcgagctgagtggttgtgtggtcgcgtctcggaaaccggtagcgcttgcagcatggctgaccaactgactgaagagcagattgcagaattcaaagaagctttttcactatttgacaaagatggtgatggaactataacaacaaaggaattgggaactgtaatgagatctcttgggcagaatcccacagaagcagagttacaggacatgattaatgaagtagatgctgatggtaatggcacaattgacttccctgaatttctgacaatgatggcaagaaaaatgaaagacacagacagtgaagaagaaattagagaagcattccgtgtgtttgataaggatggcaatggctatattagtgctgcagaacttcgccatgtgatgacaaaccttggagagaagttaacagatgaagaagttgatgaaatgatcagggaagcagatattgatggtgatggtcaagtaaactatgaagagtttgtacaaatgatgacagcaaagtgaagaccttgtacagaatgtgttaaatttcttgtacaaaattgtttatttgccttttctttgtttgtaacttatctgtaaaaggtttctccctactgtcaaaaaaatatgcatgtatagtaattaggacttcattcctccatgttttcttcccttatcttactgtcattgtcctaaaaccttattttagaaaattgatcaagtaacatgttgcatgtggcttactctggatatatctaagcccttctgcacatctaaacttagatggagttggtcaaatgagggaacatctgggttatgccttttttaaagtagttttctttaggaactgtcagcatgttgttgttgaagtgtggagttgtaactctgcgtggactatggacagtcaacaatatgtacttaaaagttgcactattgcaaaacgggtgtattatccaggtactcgtacactatttttttgtactgctggtcctgtaccagaaacattttcttttattgttacttgctttttaaactttgtttagccacttaaaatctgcttatggcacaatttgcctcaaaatccattccaagttgtatatttgttttccaataaaaaaattacaatttacccaatggttgctctgcatctgagtcatttaactgttgaagtctaataattttgaaaataaaatatggcattggtttctgcttggtaaaaaaaa

SEQ ID NO: 275 - DNA, 748 bp, Homo sapiens
  ref <308>: DATABASE ACCESSION NUMBER: NCBI / NM_004231
  ref <309>: DATABASE ENTRY DATE: 2011-12-04
  ref <313>: RELEVANT RESIDUES IN SEQ ID NO: (1)..(748)
atgctcgaagggtgggggttgaggccgacggggcgccgtacggcggaggcggggtttcagtggcttctggtgctctagggtgagctctgcccggctgcagggatggcggggaggggtaagctcatcgcagtgatcggagacgaggacacggtgactggtttcctgctgggcggcataggggagcttaacaagaaccgccatcccaatttcctggtggtggagaaggatacaaccatcaatgagatcgaagacactttccggcaatttctaaaccgggatgacattggcatcatcctcatcaaccagtacatcgcagagatggtgcggcatgccctggacgcccaccagcagtccatccccgctgtcctggagatcccctccaaggagcacccatatgacgccgccaaggactccatcctgcgcagggccaggggcatgttcactgccgaagacctgcgctaggggactcctcatagccctcagcccttccctcgtttccaggcctctccccaggcttgccatcagccttctttactttttgagcctctgatttccaattccctgctccttcccactccattaagaggctaggtgaggcgcttctaggttgctggggctctgctggttaaggaacaggaagcctgaccatctccctccactacctcttccctgtgctgttacacagtgtcattgttgatgttaaattaaagtcatattcttgcttctctccagaaaaaaaaaaaaaaaa

SEQ ID NO: 276 - DNA, 1923 bp, Homo sapiens
  ref <308>: DATABASE ACCESSION NUMBER: NCBI / NM_004893
  ref <309>: DATABASE ENTRY DATE: 2011-12-18
  ref <313>: RELEVANT RESIDUES IN SEQ ID NO: (1)..(1923)
gactgtctacattagtaattcccaacttgggtccgaaagtgaacttttgctgaagcgaagtagctaaccgcttccatgtgcaaggcaggttccagacttcggggtgaggaggattaactgaaggaccccaggggaaccggtgtgctcactgatccgcctccagggccaccgccatgtcgagccgcggtgggaagaagaagtccaccaagacgtccaggtctgccaaagcaggagtcatctttcccgtggggcggatgctgcggtacatcaagaaaggccaccccaagtacaggattggagtgggggcacccgtgtacatggccgccgtcctggaatacctgacagcggagattctggagctggctggcaatgcagcgagagacaacaagaagggacgggtcacaccccggcacatcctgctggctgtggccaatgatgaagagctgaatcagctgctaaaaggagtcaccatagccagtgggggtgtgttacccaacatccaccccgagttgctagcgaagaagcggggatccaaaggaaagttggaagccatcatcacaccacccccagccaaaaaggccaagtctccatcccagaagaagcctgtatctaaaaaagcaggaggcaagaaaggggcccggaaatccaagaagcagggtgaagtcagtaaggcagccagcgccgacagcacaaccgagggcacacctgccgacggcttcacagtcctctccaccaagagcctcttccttggccagaagctgaaccttattcacagtgaaatcagtaatttagccggctttgaggtggaggccataatcaatcctaccaatgctgacattgaccttaaagatgacctaggaaacacgctggagaagaaaggtggcaaggagtttgtggaagctgtcctggaactccggaaaaagaacgggcccttggaagtagctggagctgctgtcagcgcaggccatggcctgcctgccaagtttgtgatccactgtaatagtccagtttggggtgcagacaagtgtgaagaacttctggaaaagacagtgaaaaactgcttggccctggctgatgataagaagctgaaatccattgcatttccatccatcggcagcggcaggaacggttttccaaagcagacagcagctcagctgattctgaaggccatctccagttacttcgtgtctacaatgtcctcttccatcaaaacggtgtacttcgtgctttttgacagcgagagtataggcatctatgtgcaggaaatggccaagctggacgccaactaggctgagcaatgacagaaccagctgcaccatgtaccccaccttcagtttaaaagaaaaaaaaaatccccttcactcctactgggaggtgggacccctttcattttcagttttgctcatctagggaaaataaggctttggtttccagtttaattgtttttgaccttctaaaatgtttttatgttagcactgatagttggcattactgttgttaagcactgtgttccagaccgtgtctgacttagtgtaacctaggagattttatagttttattttaatgaaaccctgattgacgcacagcagtggggagaacagcgtcttttacctgtcaccgaagccaggaagccccgtttgtaagcgtgtgttgtggtgctttattgtacatcctccagtggcgttctttttactctaatgttcttttggtttcccccctcagaagaatcatgaatttgcaacagacctaatttttggttactttttgtcttattgatggatttgaaaatgaaagatttaataaggcaaagcagaatctgttgtccttaattatatttgcaatttggaatttgtgtgagttgatttagtaaaatgttaaaccgttaaaaaaaaaaaaaaaaaaaaaaaaaaaaaaaaaaaaaaa

SEQ ID NO: 277 - DNA, 573 bp, Homo sapiens
  ref <308>: DATABASE ACCESSION NUMBER: NCBI / NM_004146
  ref <309>: DATABASE ENTRY DATE: 2011-12-04
  ref <313>: RELEVANT RESIDUES IN SEQ ID NO: (1)..(573)
ctgactgaggggtcagtggttccgggtaggagctaggtgaccctcggctgctgcagggatctgcagcgactgcagccatgggggcccacctggtccggcgctacctgggcgatgcctcggtggagcccgaccccctgcagatgccaaccttcccgccagactacggcttccccgaacgcaaggagcgcgagatggtggccacacagcaggagatgatggacgcgcagctgaggctccagctgcgggactactgcgcccaccacctcatccggctgctcaagtgcaagcgtgacagcttccccaacttcctggcctgcaagcaggagcggcacgactgggactactgcgagcaccgcgactatgtgatgcgcatgaaggagtttgagcgggagcggaggctgctccagcggaagaagcggcgggagaagaaggcggcagagttggccaaaggccagggacccggggaagtggaccccaaggtggccctgtagggggtgcaccccccaccctatggaccagtcaaataaaagccttcaggcccctcaaaaaaaaaaaaaaaaaaaaaaaaaaaaa

SEQ ID NO: 278 - DNA, 3428 bp, Homo sapiens
  ref <308>: DATABASE ACCESSION NUMBER: NCBI / NM_002128
  ref <309>: DATABASE ENTRY DATE: 2011-12-17
  ref <313>: RELEVANT RESIDUES IN SEQ ID NO: (1)..(3428)
tggagagtaatgttacagagcggagagagtgaggaggctgcgtctggctcccgctctcacagccattgcagtacattgagctccatagagacagcgccggggcaagtgagagccggacgggcactgggcgactctgtgcctcgctgaggaaaaataactaaacatgggcaaaggagatcctaagaagccgagaggcaaaatgtcatcatatgcattttttgtgcaaacttgtcgggaggagcataagaagaagcacccagatgcttcagtcaacttctcagagttttctaagaagtgctcagagaggtggaagaccatgtctgctaaagagaaaggaaaatttgaagatatggcaaaagcggacaaggcccgttatgaaagagaaatgaaaacctatatccctcccaaaggggagacaaaaaagaagttcaaggatcccaatgcacccaagaggcctccttcggccttcttcctcttctgctctgagtatcgcccaaaaatcaaaggagaacatcctggcctgtccattggtgatgttgcgaagaaactgggagagatgtggaataacactgctgcagatgacaagcagccttatgaaaagaaggctgcgaagctgaaggaaaaatacgaaaaggatattgctgcatatcgagctaaaggaaagcctgatgcagcaaaaaagggagttgtcaaggctgaaaaaagcaagaaaaagaaggaagaggaggaagatgaggaagatgaagaggatgaggaggaggaggaagatgaagaagatgaagatgaagaagaagatgatgatgatgaataagttggttctagcgcagttttttttttcttgtctataaagcatttaacccccctgtacacaactcactccttttaaagaaaaaaattgaaatgtaaggctgtgtaagatttgtttttaaactgtacagtgtctttttttgtatagttaacacactaccgaatgtgtctttagatagccctgtcctggtggtattttcaatagccactaaccttgcctggtacagtatgggggttgtaaattggcatggaaatttaaagcaggttcttgttggtgcacagcacaaattagttatatatggggatggtagttttttcatcttcagttgtctctgatgcagcttatacgaaataattgttgttctgttaactgaataccactctgtaattgcaaaaaaaaaaaaaaagttgcagctgttttgttgacattctgaatgcttctaagtaaatacaattttttttattagtattgttgtccttttcataggtctgaaatttttcttcttgaggggaagctagtcttttgcttttgcccattttgaatcacatgaattattacagtgtttatcctttcatatagttagctaataaaaagcttttgtctacacaccctgcatatcataatgggggtaaagttaagttgagatagttttcatccataactgaacatccaaaatcttgatcagttaagaaatttcacatagcccacttacatttacaaactgaagagtaatcaatctactcaaagcatgggattattagaatcaaacattttgaaagtctgtccttgaaggactaatagaaaagtatgttctaacctttacatgaggactctattctttaactcccattaccatgtaatggcagttatattttgcagttcccacattaaagaagacctgagaatgtatccccaaaagcgtgagcttaaaatacaagactgccatattaaattttttgttgacattagtctcagtgaagactatgaaaatgctggctatagatgtcttttcccatttatctaaatatggactgctcaggaaacgagactttccattacaagtatttttaattaattgggccagcttttcaaacaaagatgccacattcaaaatagggtatattttcctatattacggtttgcccctttataaatccaagtagataggaagaaagaagacaaactttgcatctcagtatgaattattcaatttatttgaatgatttttctttacaaaacaaactcattcattagtcatgtttatctgcttaggagtttagggaacaatttggcaattttgtggttttcgagattatcgttttcttaaagtgccagtattttaaaatagcgttcttgtaattttacacgcttttgtgatggagtgctgttttgttatataatttagacttggattctttccatttgcatttgtttatgtaatttcaggaggaatactgaacatctgagtcctggatgatactaataaactaataattgcagaggttttaaatactagttaaatggctttcacttaagaacttaagattttgttacatatttttaaatcttgtttctaataatacctcttagcagtaccttttaaataagtataagggatggcaaagtttttccctttaaaaatactcactttatgcttataaataggttaatgggctgataaaaggttttgtcaaacattgcaagtattcggtgctatatataaaggaggaaaaactagttttactttcagaatgatttaaacaagatttttaaaaacaagatacatgcaagcgaacagcagggttagtgataggctgcaattgtgtcgaacatcagattttttgttaagaggagcaaatgactcaatctgatttagatggaagtttctactgtatagaaatcaccattaatcaccaacattaataattctgatccatttaaaatgaattctggctcaaggagaatttgtaactttagtaggtacgtcatgacaactaccatttttttaagatgttgagaatgggaacagtttttttagggtttattcttgaccacagatcttaagaaaatggacaaaacccctcttcaatctgaagattagtatggtttggtgttctaacagtatcccctagaagttggatgtctaaaactcaagtaaatggaagtgggaggcaatttagataagtgtaaagccttgtaactgaagatgattttttttagaaagtgtatagaaactattttaatgccaagatagttacagtgctgtggggtttaaagactttgttgacatcaagaaaagactaaatctataattaattgggccaacttttaaaatgaagatgctttttaaaactaatgaactaagatgtataaatcttagtttttttgtattttaaagataggcatatggcatattgattaacgagtcaaatttcctaactttgctgtgcaaaggttgagagctattgctgattagttaccacagttctgatgatcgtcccatcacagtgttgttaatgtttgctgtatttattaattttcttaaagtgaaatctgaaaaatgaaatttgtgtgtcctgtgtacccgaggggtaatgattaaatgataaagataagaaaa

SEQ ID NO: 279 - DNA, 1620 bp, Homo sapiens
  ref <308>: DATABASE ACCESSION NUMBER: NCBI / NM_002002
  ref <309>: DATABASE ENTRY DATE: 2011-12-18
  ref <313>: RELEVANT RESIDUES IN SEQ ID NO: (1)..(1620)
agtggctctactttcagaagaaagtgtctctcttcctgcttaaacctctgtctctgacggtccctgccaatcgctctggtcgaccccaacacactaggaggacagacacaggctccaaactccactaaccagagctgtgattgtgcccgctgagtggactgcgttgtcagggagtgagtgctccatcatcgggagaatccaagcaggaccgccatggaggaaggtcaatattcagagatcgaggagcttcccaggaggcggtgttgcaggcgtgggactcagatcgtgctgctggggctggtgaccgccgctctgtgggctgggctgctgactctgcttctcctgtggcactgggacaccacacagagtctaaaacagctggaagagagggctgcccggaacgtctctcaagtttccaagaacttggaaagccaccacggtgaccagatggcgcagaaatcccagtccacgcagatttcacaggaactggaggaacttcgagctgaacagcagagattgaaatctcaggacttggagctgtcctggaacctgaacgggcttcaagcagatctgagcagcttcaagtcccaggaattgaacgagaggaacgaagcttcagatttgctggaaagactccgggaggaggtgacaaagctaaggatggagttgcaggtgtccagcggctttgtgtgcaacacgtgccctgaaaagtggatcaatttccaacggaagtgctactacttcggcaagggcaccaagcagtgggtccacgcccggtatgcctgtgacgacatggaagggcagctggtcagcatccacagcccggaggagcaggacttcctgaccaagcatgccagccacaccggctcctggattggccttcggaacttggacctgaagggggagtttatctgggtggatgggagccacgtggactacagcaactgggctccaggggagcccaccagccggagccagggcgaggactgcgtgatgatgcggggctccggtcgctggaacgacgccttctgcgaccgtaagctgggcgcctgggtgtgcgaccggctggccacatgcacgccgccagccagcgaaggttccgcggagtccatgggacctgattcaagaccagaccctgacggccgcctgcccaccccctctgcccctctccactcttgagcatggatacagccaggcccagagcaagaccctgaagacccccaaccacggcctaaaagcctctttgtggctgaaaggtccctgtgacattttctgccacccaaacggaggcagctgacacatctcccgctcctctatggcccctgccttcccaggagtacaccccaacagcaccctctccagatgggagtgcccccaacagcaccctctccagatgagagtacaccccaacagcaccctctccagatgagagtacaccccaacagcaccctctccagatgagagtacaccccaacagcaccctctccagatgcagccccatctcctcagcaccccaggacctgagtatccccagctcaggtggtgagtcctcctgtccagcctgcatcaataaaatggggcagtgatggcctcccacatttgtccccttcttggaaaaaa

SEQ ID NO: 280 - DNA, 1155 bp, Homo sapiens
  ref <308>: DATABASE ACCESSION NUMBER: NCBI / NM_000858
  ref <309>: DATABASE ENTRY DATE: 2011-11-27
  ref <313>: RELEVANT RESIDUES IN SEQ ID NO: (1)..(1155)
agtctcgcgcgcgggcggaggtgggccggtgcggcgctgtcacgtaggttcagtgggcggaagaggtggccccggatgctgcggcgcccgctggccgggctggctgcggccgccctgggccgggccccaccggacggcttgctctgctctttacctggggttgctgtcgaggaccctgtgcaagactcggccggtttttctttctccctgatggacagacccaaacatagccgcgcagcatcgtgaagggctggggccttcactcctctgtggctctggaagagcccgatttcctcaggaggcatgtcgggccccaggcctgtggtgctgagcgggccttcgggagctgggaagagcaccctgctgaagaggctgctccaggagcacagcggcatctttggcttcagcgtgtcccataccacgaggaacccgaggcccggcgaggagaacggcaaagattactactttgtaaccagggaggtgatgcagcgtgacatagcagccggcgacttcatcgagcatgccgagttctcggggaacctgtatggcacgagcaaggtggcggtgcaggccgtgcaggccatgaaccgcatctgtgtgctggacgtggacctgcagggtgtgcggaacatcaaggccaccgatctgcggcccatctacatctctgtgcagccgccttcactgcacgtgctggagcagcggctgcggcagcgcaacactgaaaccgaggagagcctggtgaagcggctggctgctgcccaggccgacatggagagcagcaaggagcccggcctgtttgatgtggtcatcattaacgacagcctggaccaggcctacgcagagctgaaggaggcgctctctgaggaaatcaagaaagctcaaaggaccggcgcctgaggcttgctgtctgttctcggcaccccgggcccatacaggaccagggcagcagcattgagccacccccttggcaggcgatacggcagctctgtgcccttggccagcatgtggagtggaggagatgctgcccctgtggttggaacatcctggggtgacccccgacccagcctcgctgggctgtcccctgtccctatctctcactctggacccagggctgacatcctaataaaataactgttggattagaaactccataaa

SEQ ID NO: 281 - DNA, 2156 bp, Homo sapiens
  ref <308>: DATABASE ACCESSION NUMBER: NCBI / NM_001469
  ref <309>: DATABASE ENTRY DATE: 2011-12-15
  ref <313>: RELEVANT RESIDUES IN SEQ ID NO: (1)..(2156)
gcgcatgcgtggattgtcgtcttctgtccaagttggtcgcttccctgcgccaaagtgagcagtagccaacatgtcagggtgggagtcatattacaaaaccgagggcgatgaagaagcagaggaagaacaagaagagaaccttgaagcaagtggagactataaatattcaggaagagatagtttgatttttttggttgatgcctccaaggctatgtttgaatctcagagtgaagatgagttgacaccttttgacatgagcatccagtgtatccaaagtgtgtacatcagtaagatcataagcagtgatcgagatctcttggctgtggtgttctatggtaccgagaaagacaaaaattcagtgaattttaaaaatatttacgtcttacaggagctggataatccaggtgcaaaacgaattctagagcttgaccagtttaaggggcagcagggacaaaaacgtttccaagacatgatgggccacggatctgactactcactcagtgaagtgctgtgggtctgtgccaacctctttagtgatgtccaattcaagatgagtcataagaggatcatgctgttcaccaatgaagacaacccccatggcaatgacagtgccaaagccagccgggccaggaccaaagccggtgatctccgagatacaggcatcttccttgacttgatgcacctgaagaaacctgggggctttgacatatccttgttctacagagatatcatcagcatagcagaggatgaggacctcagggttcactttgaggaatccagcaagctagaagacctgttgcggaaggttcgcgccaaggagaccaggaagcgagcactcagcaggttaaagctgaagctcaacaaagatatagtgatctctgtgggcatttataatctggtccagaaggctctcaagcctcctccaataaagctctatcgggaaacaaatgaaccagtgaaaaccaagacccggacctttaatacaagtacaggcggtttgcttctgcctagcgataccaagaggtctcagatctatgggagtcgtcagattatactggagaaagaggaaacagaagagctaaaacggtttgatgatccaggtttgatgctcatgggtttcaagccgttggtactgctgaagaaacaccattacctgaggccctccctgttcgtgtacccagaggagtcgctggtgattgggagctcaaccctgttcagtgctctgctcatcaagtgtctggagaaggaggttgcagcattgtgcagatacacaccccgcaggaacatccctccttattttgtggctttggtgccacaggaagaagagttggatgaccagaaaattcaggtgactcctccaggcttccagctggtctttttaccctttgctgatgataaaaggaagatgccctttactgaaaaaatcatggcaactccagagcaggtgggcaagatgaaggctatcgttgagaagcttcgcttcacatacagaagtgacagctttgagaaccccgtgctgcagcagcacttcaggaacctggaggccttggccttggatttgatggagccggaacaagcagtggacctgacattgcccaaggttgaagcaatgaataaaagactgggctccttggtggatgagtttaaggagcttgtttacccaccagattacaatcctgaagggaaagttaccaagagaaaacacgataatgaaggttctggaagcaaaaggcccaaggtggagtattcagaagaggagctgaagacccacatcagcaagggtacgctgggcaagttcactgtgcccatgctgaaagaggcctgccgggcttacgggctgaagagtgggctgaagaagcaggagctgctggaagccctcaccaagcacttccaggactgaccagaggccgcgcgtccagctgcccttccgcagtgtggccaggctgcctggccttgtcctcagccagttaaaatgtgtttctcctgagctaggaagagtctacccgacataagtcgagggactttatgtttttgaggctttctgttgccatggtgatggtgtagccctcccactttgctgttccttactttactgcctgaataaagagccctaagtttgtactatatactgttaaaaaaaaaaaaaaaaaaaaaaa

SEQ ID NO: 282 - DNA, 2143 bp, Homo sapiens
  ref <308>: DATABASE ACCESSION NUMBER: NCBI / NM_003766
  ref <309>: DATABASE ENTRY DATE: 2011-12-24
  ref <313>: RELEVANT RESIDUES IN SEQ ID NO: (1)..(2143)
ggaagttttccggcggctaccgggaagtcgctgaagacagagcgatggtagttctggaggcctcgctccggggccgacccgaggccacagtgcctccgcggtagaccggacttgggtgacgggctccgggctcccgaggtgaagagcatcgggggctgagggatggaagggtctaagacgtccaacaacagcaccatgcaggtgagcttcgtgtgccagcgctgcagccagcccctgaaactggacacgagtttcaagatcctggaccgtgtcaccatccaggaactcacagctccattacttaccacagcccaggcgaaaccaggagagacccaggaggaagagactaactcaggagaggagccatttattgaaactcctcgccaggatggtgtctctcgcagattcatccccccagccaggatgatgtccacagaaagtgccaacagcttcactctgattggggaggcatctgatggcggcaccatggagaacctcagccgaagactgaaggtcactggggacctttttgacatcatgtcgggccagacagatgtggatcacccactctgtgaggaatgcacagatactcttttagaccagctggacactcagctcaacgtcactgaaaatgagtgtcagaactacaaacgctgtttggagatcttagagcaaatgaatgaggatgacagtgaacagttacagatggagctaaaggagctggcactagaggaggagaggctgatccaggagctggaagacgtggaaaagaaccgcaagatagtggcagaaaatctcgagaaggtccaggctgaggctgagagactggatcaggaggaagctcagtatcagagagaatacagtgaatttaaacgacagcagctggagctggatgatgagctgaagagtgttgaaaaccagatgcgttatgcccagacgcagctggataagctgaagaaaaccaacgtctttaatgcaaccttccacatctggcacagtggacagtttggcacaatcaataacttcaggctgggtcgcctgcccagtgttcccgtggaatggaatgagattaatgctgcttggggccagactgtgttgctgctccatgctctggccaataagatgggtctgaaatttcagagataccgacttgttccttacggaaaccattcatatctggagtctctgacagacaaatctaaggagctgccgttatactgttctggggggttgcggtttttctgggacaacaagtttgaccatgcaatggtggctttcctggactgtgtgcagcagttcaaagaagaggttgagaaaggcgagacacgtttttgtcttccctacaggatggatgtggagaaaggcaagattgaagacacaggaggcagtggcggctcctattccatcaaaacccagtttaactctgaggagcagtggacaaaagctctcaagttcatgctgacgaatcttaagtggggtcttgcttgggtgtcctcacaattttataacaaatgacttttttccttagggggaggtttgccttaaaggcttttaattttgttttgtttgcaaacatgttttaaattaaattcgggtaatattaaacagtacatgtttacaataccaaaaaagaaaaaatccacaaaagccactttattttaaaatatcatgtgacagatactttccagagctacaacatgccatctatagttgccagccctggtcagttttgattcttaaccccatggactcctttccctttcttctctgaaaaaaactaatttaaatttgcttttcttttttttaactgagttgaattgagattgatgtgttttcactggatttttatctctctcaacttcctgcacttaacaatatgaaatagaaacttttgtctttactgagatgaggatatgtttgagatgcacagttggataatgtgggaaaatgacatctaagctttacctggtcaccatgtgatgtgatcagatgcttgaaatttaacacttttcacttggttcttatactgaatgccgactctgctctgtgttagagatatgaaatggtgtttgatactgtttgagacattatggagagatttaattatttgtaataaaagatttgctgcagtctgaaaactgcc

SEQ ID NO: 283 - DNA, 6113 bp, Homo sapiens
  ref <308>: DATABASE ACCESSION NUMBER: NCBI / NM_003906
  ref <309>: DATABASE ENTRY DATE: 2011-12-17
  ref <313>: RELEVANT RESIDUES IN SEQ ID NO: (1)..(6113)
taatacttaattaccttctaataattggagcagaagatgaacccaactaatcctttcagtgggcagcagcctagtgctttttcggcgtcttctagtaatgtaggaacacttccatctaagccgccatttcgatttggtcaaccttctctttttggacaaaacagtaccttatctgggaagagctcgggattttcacaggtatccagctttccagcgtcttctggagtaagtcattcctcttcagtgcaaacattagggttcacccaaacctcaagtgttggacccttttctggacttgagcacacttccacctttgtggctacctctgggccttcaagttcatctgtgctgggaaacacaggatttagttttaaatcacccaccagtgttggggctttcccaagcacttctgcttttggacaagaagctggagaaatagtgaactctggttttgggaaaacagaattcagctttaaacctctggaaaatgcagtgttcaaaccaatactgggggctgaatctgagccagagaaaacccagagccaaattgcttctgggttttttacattttcccacccaattagtagtgcacctggaggcctggcccctttctcttttcctcaagtaacaagtagttcagctaccacttcaaattttaccttttcaaaacctgttagtagtaataattcattatctgcctttacccctgctttgtcaaaccaaaatgtagaggaagagaagagaggacctaagtcaatatttggaagttctaataatagcttcagtagcttccctgtatcatctgcggttttgggcgaacctttccaggctagcaaagcaggtgtcaggcaggggtgtgaagaagctgtttcccaggtggaaccacttcccagcctaatgaaaggactgaaaaggaaggaggaccaggatcgctccccaaggagacatggccacgagccagcagaagattcggatcctctgtcccggggcgatcatcctccagacaaacgacctgtccgcctgaatcgaccccggggaggtactttatttggtcggacgatacaggatgttttcaaaagcaataaggaagtaggtcgtctgggcaacaaggaggccaaaaaggaaactggctttgttgagtctgcagaaagtgaccacatggctatcccaggagggaatcagtctgtcctggcaccttcccggattccaggtgtgaataaagaggaagaaactgaaagtagagagaagaaagaagattctctaagaggaactccggcgcgtcagagtaacagaagcgagagcacagacagtcttgggggcttgtctccctctgaagtcacagccatccagtgcaagaacatccctgactacctcaacgacaggaccattctggagaaccattttggcaaaattgctaaagtgcagcgcatctttaccaggcgcagcaaaaagcttgcagtggtacatttctttgatcatgcatctgcagccctggctagaaagaaggggaaaagtttgcataaagacatggctatcttttggcacaggaagaaaataagccccaataagaaacccttttccctgaaggagaagaaaccaggtgacggtgaagtcagcccgagcacagaggatgcaccctttcagcactctcctcttggcaaggccgcagggaggactggtgctagcagcctcctgaataaaagctctccagtgaagaagccaagtcttctaaaggcccaccaattcgagggagactcttttgactcagcctccgagggctccgagggcctcgggccatgtgtgctctccctcagtaccctgataggcactgtggctgagacatccaaggagaagtaccgcctgcttgaccagagagacaggatcatgcggcaagctcgggtgaagagaaccgatctggacaaagcgaggacttttgttggcacctgcctggatatgtgtcctgagaaggagaggtacatgcgggagacccgtagccagctgagcgtgttcgaagtggtcccagggactgaccaggtggaccacgcagcagctgtgaaagagtacagtcggtcctcggcggatcaggaggagcccctgccccacgagctgcggcccttgccagtgctcagcaggaccatggactacctggtgacccagatcatggaccagaaggagggcagcctgcgggattggtatgacttcgtgtggaaccgcacgcgtggcatacggaaggatatcacgcagcagcacctctgtgaccccctgacggtgtccctgattgagaagtgcacccggtttcacatccactgtgcccacttcatgtgtgaggagcccatgtcctcctttgatgccaagatcaataatgagaacatgaccaagtgcctgcagagcctgaaggagatgtaccaggacctgagaaacaagggtgtcttctgtgccagcgaagcggagttccagggctacaatgttctgctcagtctcaacaagggagacatcctaagagaagtacaacagttccatcctgctgttagaaactcatctgaggtgaaatttgctgttcaggcttttgctgcattgaacagtaataattttgtgagatttttcaaactggtccagtcagcttcttacctgaacgcttgtcttttacactgttacttcagtcagatccgcaaggatgctctccgggcgctcaactttgcgtacacggtgagcacacagcgatctaccatctttcccctggatggtgtggtgcgcatgctgctgttcagagactgtgaagaggccaccgacttcctcacctgccacggcctcaccgtttccgacggctgtgtggagctgaaccggtctgcattcctggaaccagagggattatccaagaccaggaagtcggtgtttattactaggaagctgacggtgtcagtcggggaaattgtgaacggagggccattgccccccgtccctcgtcatacccctgtgtgcagcttcaactcccagaacaagtacatcggggagagcctggccgcggagctgcccgtcagcacccagagacccggctccgacacagtgggcggagggagaggagaggagtgtggtgtagagccggatgcacccctgtccagtctcccacagtctctaccagcccctgcgccctcaccagtgcctctgcctcctgtcctggcactgaccccgtctgtggcgcccagcctcttccagctgtctgtgcagcctgaaccaccgcctccagagcccgtgcccatgtactctgacgaggacctggcgcaggtggtggacgagctcatccaggaggccctgcagagggactgtgaggaagttggctctgcgggtgctgcctacgcagctgccgccctgggtgtttctaatgctgctatggaggatttgttaacagctgcaaccacgggcattttgaggcacattgcagctgaagaagtgtctaaggaaagagagcgaagggagcaggagaggcagcgggctgaagaggaaaggttgaaacaagagagagagctggtgttaagtgagctgagccagggcctggccgtggagctgatggaacgcgtgatgatggagtttgtgagggaaacctgctcccaggagttgaagaatgcagtagagacagaccagagggtccgtgtggcccgttgctgtgaggatgtctgtgcccacttagtggacttgtttctcgtggaggaaatcttccagactgcaaaggagaccctccaggagcttcagtgcttctgcaagtatctacagcggtggagggaagctgtcacagcccgcaagaaactgaggcgccaaatgcgggctttccctgctgcgccctgctgcgtggacgtgagcgaccggctgagggcgctggcgcccagcgcagagtgccccattgctgaagagaacctggccaggggcctcctggacctgggccatgcagggagattgggcatctcctgcaccaggttaaggcggctcagaaacaagacagctcaccagatgaaggttcagcacttctaccagcagctgctgagtgatgtggcatgggcgtctctggacctgccatccctcgtggctgagcacctccctgggaggcaggagcatgtgttttggaagctggtgctggtgttgccggatgtagaggagcagtccccagagagttgtggcagaattctagcaaattggttaaaagtcaagttcatgggagatgaaggctcagtggatgacacatccagcgatgctggtgggattcagacgctttcgcttttcaactcacttagcagcaaaggggatcagatgatttctgttaacgtgtgtataaaggtggcccatggcgccctcagtgatggtgccattgatgctgtggagacacagaaggacctcctgggagccagtgggctcatgctgctgcttccccccaaaatgaagagtgaggacatggcagaggaggacgtgtactggctgtcggccttgctgcagctcaagcagctcctgcaggctaagcccttccagcctgcgcttcctctggtggttcttgtgcctagcccaggaggggacgccgttgagaaggaagtagaagatggtctgatgctacaggacttggtttcagctaagctgatttcagattacactgttaccgagatccctgataccattaatgatctacaaggttcaactaaggttttgcaagcagtgcagtggctggtttcccactgcccccattcccttgacctctgctgccagactctcattcagtacgtcgaagacgggattggccatgagtttagtggccgctttttccatgacagaagagagaggcgtctgggcggtcttgcttctcaggagcctggcgccatcattgagctgtttaacagtgtgctgcagttcctggcttctgtggtgtcctctgaacagctgtgtgacctgtcctggcctgtcactgagtttgctgaggcagggggcagccggctgcttcctcacctgcactggaatgccccagagcacctggcctggctgaagcaggctgtgctcgggttccagcttccgcagatggaccttccacccctgggggccccctggctccccgtgtgctccatggttgtccagtacgcctcccagatccccagctcacgccagacacagcctgtcctccagtcccaggtggagaacctgctccacagaacctactgtaggtggaagagcaagagtccctccccagtccatggggcaggcccctcggtcatggagatcccatgggatgatcttatcgccttgtgtatcaaccacaagctgagagactggacgcccccccggcttcctgttacatcagaggcgctgagtgaagatggtcagatatgtgtgtatttttttaaaaacgatttgaaaaaatatgatgttcctttgtcgtgggaacaagccaggttgcagacgcagaaggagctacagctgagagagggacgtttggcaataaagccttttcatccttctgcaaacaattttcccataccattgcttcacatgcaccgtaactggaagaggagcacagagtgtgctcaagaggggaggattcccagcacagaggatctgatgcgaggagcttctgctgaggagctcttggcgcagtgtttgtcgagcagtctgctgctggagaaagaagagaacaagaggtttgaagatcagcttcagcaatggttgtctgaagactcaggagcatttacggatttaacttcccttcccctctatcttcctcagactctagtgtctctttctcacactattgaacctgtgatgaaaacatctgtaactactagcccacagagtgacatgatgagggagcaactgcagctgtcagaggcgacaggaacgtgtctaggcgaacgactaaagcacctggaaaggctgatccggagttcaagggaagaggaagttgcctctgagctccatctctctgcgctgctagacatggtggacatttgagcagcctgacctgtggggagggggtctctcccgaagagtttctgtttttactcaaaataatgttattctcagatgcttgatgcactgttggaaatgtgattaatttaatcatgcagataaaccatttaaatgtc

SEQ ID NO: 284 - DNA, 4249 bp, Homo sapiens
  ref <308>: DATABASE ACCESSION NUMBER: NCBI / NM_000757
  ref <309>: DATABASE ENTRY DATE: 2011-12-25
  ref <313>: RELEVANT RESIDUES IN SEQ ID NO: (1)..(4249)
agtgcagcgcagaagacagagggtgactaggaagacgcgcgagcggggctggccggccggcgggtgggggaggggaggcgggggaaggcggctgagtgggcctctggagtgtgtgtgtctgtgtcagtgtgtgtgtgtgtgtgtgtatgtgtgtgtctggcgcctggccagggtgatttcccataaaccacatgccccccagtcctctcttaaaaggctgtgccgagggctggccagtgaggctcggcccggggaaagtgaaagtttgcctgggtcctctcggcgccagagccgctctccgcatcccaggacagcggtgcggccctcggccggggcgcccactccgcagcagccagcgagcgagcgagcgagcgagggcggccgacgcgcccggccgggacccagctgcccgtatgaccgcgccgggcgccgccgggcgctgccctcccacgacatggctgggctccctgctgttgttggtctgtctcctggcgagcaggagtatcaccgaggaggtgtcggagtactgtagccacatgattgggagtggacacctgcagtctctgcagcggctgattgacagtcagatggagacctcgtgccaaattacatttgagtttgtagaccaggaacagttgaaagatccagtgtgctaccttaagaaggcatttctcctggtacaagacataatggaggacaccatgcgcttcagagataacacccccaatgccatcgccattgtgcagctgcaggaactctctttgaggctgaagagctgcttcaccaaggattatgaagagcatgacaaggcctgcgtccgaactttctatgagacacctctccagttgctggagaaggtcaagaatgtctttaatgaaacaaagaatctccttgacaaggactggaatattttcagcaagaactgcaacaacagctttgctgaatgctccagccaagatgtggtgaccaagcctgattgcaactgcctgtaccccaaagccatccctagcagtgacccggcctctgtctcccctcatcagcccctcgccccctccatggcccctgtggctggcttgacctgggaggactctgagggaactgagggcagctccctcttgcctggtgagcagcccctgcacacagtggatccaggcagtgccaagcagcggccacccaggagcacctgccagagctttgagccgccagagaccccagttgtcaaggacagcaccatcggtggctcaccacagcctcgcccctctgtcggggccttcaaccccgggatggaggatattcttgactctgcaatgggcactaattgggtcccagaagaagcctctggagaggccagtgagattcccgtaccccaagggacagagctttccccctccaggccaggagggggcagcatgcagacagagcccgccagacccagcaacttcctctcagcatcttctccactccctgcatcagcaaagggccaacagccggcagatgtaactggtaccgccttgcccagggtgggccccgtgaggcccactggccaggactggaatcacaccccccagaagacagaccatccatctgccctgctcagagaccccccggagccaggctctcccaggatctcatcactgcgcccccagggcctcagcaacccctccaccctctctgctcagccacagctttccagaagccactcctcgggcagcgtgctgccccttggggagctggagggcaggaggagcaccagggatcggaggagccccgcagagccagaaggaggaccagcaagtgaaggggcagccaggcccctgccccgttttaactccgttcctttgactgacacaggccatgagaggcagtccgagggatcctccagcccgcagctccaggagtctgtcttccacctgctggtgcccagtgtcatcctggtcttgctggccgtcggaggcctcttgttctacaggtggaggcggcggagccatcaagagcctcagagagcggattctcccttggagcaaccagagggcagccccctgactcaggatgacagacaggtggaactgccagtgtagagggaattctaagctggacgcacagaacagtctctccgtgggaggagacattatggggcgtccaccaccacccctccctggccatcctcctggaatgtggtctgccctccaccagagctcctgcctgccaggactggaccagagcagccaggctggggcccctctgtctcaacccgcagacccttgactgaatgagagaggccagaggatgctccccatgctgccactatttattgtgagccctggaggctcccatgtgcttgaggaaggctggtgagcccggctcaggaccctcttccctcaggggctgcaccctcctctcactcccttccatgccggaacccaggccagggacccaccggcctgtggtttgtgggaaagcagggtggacgctgaggagtgaaagaaccctgcacccagagggcctgcctggtgccaaggtatcccagcctggacaggcatggacctgtctccagagagaggagcctgaagttcgtggggcgggacagcgtcggcctgatttcccgtaaaggtgtgcagcctgagagacgggaagaggaggcctctggacctgctggtctgcactgacagcctgaagggtctacaccctcggctcacctaagtgccctgtgctggttgccaggcgcagaggggaggccagccctgccctcaggacctgcctgacctgccagtgatgccaagagggggatcaagcactggcctctgcccctcctccttccagcacctgccagagcttctccaggaggccaagcagaggctcccctcatgaaggaagccattgcactgtgaacactgtacctgcctgctgaacagcctgcccccgtccatccatgagccagcatccgtccgtcctccactctccagcctctccccagcctcctgcactgagctggcctcaccagtcgactgagggagcccctcagccctgaccttctcctgacctggcctttgactccccggagtggagtggggtgggagaacctcctgggccgccagccagagccggtctttaggctgtgttgttcgcccaggtttctgcatcttgcactttgacattcccaagagggaagggactagtgggagagagcaagggaggggagggcacagacagagaggctacagggcgagctctgactgaagatgggcctttgaaatataggtatgcacctgaggttgggggagggtctgcactcccaaaccccagcgcagtgtcctttccctgctgccgacaggaacctggggctgaacaggttatccctgtcaggagccctggactgggctgcatctcagccccacctgcatggtatccagctcccatccacttctcacccttctttcctcctgaccttggtcagcagtgatgacctccaactctcacccaccccctctaccatcacctctaaccaggcaagccagggtgggagagcaatcaggagagccaggcctcagcttccaatgcctggagggcctccactttgtggccagcctgtggtggtggctctgaggcctaggcaacgagcgacagggctgccagttgcccctgggttcctttgtgctgctgtgtgcctcctctcctgccgccctttgtcctccgctaagagaccctgccctacctggccgctgggccccgtgactttcccttcctgcccaggaaagtgagggtcggctggccccaccttccctgtcctgatgccgacagcttagggaagggcagtgaacttgcatatggggcttagccttctagtcacagcctctatatttgatgctagaaaacacatatttttaaatggaagaaaaataaaaaggcattcccccttcatccccctaccttaaacatataatattttaaaggtcaaaaaagcaatccaacccactgcagaagctctttttgagcacttggtggcatcagagcaggaggagccccagagccacctctggtgtccccccaggctacctgctcaggaaccccttctgttctctgagaagtcaagagaggacattggctcacgcactgtgagattttgtttttatacttggaagtggtgaattattttatataaagtcatttaaatatctatttaaaagataggaagctgcttatatatttaataataaaagaagtgcacaagctgccaaaaaaaaaaaaaaaa

SEQ ID NO: 285 - DNA, 1769 bp, Homo sapiens
  ref <308>: DATABASE ACCESSION NUMBER: NCBI / NM_002149
  ref <309>: DATABASE ENTRY DATE: 2011-12-17
  ref <313>: RELEVANT RESIDUES IN SEQ ID NO: (1)..(1769)
cggcggcggcgggcagcggacgggcggactgacgggcgcctccaccttgctccctccctggctgccggcttccttttgtctttctgggcggcgatgagcgcagggccggcgcagcagctgcgggcgcacggaggcccgcgctgctagtcactcctcccggcctcggcgcgcttgtcccgggcagcggcccgggcccgctgcagccgccgccggcgccgaacttgggctcgggaagccggcggaccgcgtcctgcgccggagcaggggcatggtctagtggcccagtcaggacgcggaaacactccctggaggttctgacccactccctctcagcctccgcctggtctctggtgtagtcgccgccgccagccgccatgggcaaacagaacagcaagctgcggcccgaggtgctgcaggacctgcgggagaacacggagttcaccgaccacgagctgcaggagtggtacaagggcttcctcaaggactgccccaccggccacctgaccgtggacgagttcaagaagatctacgccaacttcttcccctacggcgacgcttccaagttcgccgagcacgtcttccgcaccttcgacaccaacggcgacggcaccatcgacttccgggagttcatcattgcgctgagcgtgacctcgcggggcaagctggagcagaagctcaagtgggccttcagcatgtacgacctggacggcaacggctacatcagccgcagcgagatgctggagatcgtgcaggccatctacaagatggtgtcgtctgtgatgaagatgccggaggatgagtccaccccggagaagcgcacagacaagatcttcaggcagatggacaccaacaatgacggcaaactgtccttggaagaattcatcagaggtgccaagagcgacccctccatcgtccgcctgctgcagtgcgaccccagcagtgccagtcagttctgagcgagcggcccctggacagttgcagagaaacacaggcttgtcgtgccgtttaagctttgcttgcaagagtggatgccccgcaatcgttcctgctctcccgggccccgggcctggggcatgcgttgcacctgcccggcccggtggctgcgcctccctcctccacctgaccaacgcgacattcctcccctcacgcctggcccggtcccttccagggcaactcccagggatgtggtgacatgcagggttcaagtgttcttggttccaggcacctcccggctcacggggagctcagaggtccatgccgaggagaccaggcaggacctcccgaggctgcgccccggccggcccatgcgttttgtgatcccaagtgactctgtgggaagggtggggacgaggcgtcgggagggtatacagggagcccctcccgtgcatggctgcccccccgttcattttctccaccacagccgcttgcacgtatagatactgtggtcccctttcttttaatatataaattatgtatggtgaagtggagtgtattgtgtaggtcccgtatttaatgcctctgactgcctttgaagcgcagccctctgtggcccgcagccccctgagcctggctgttgtgtggtatttatgctctctttgtctgcctgtttctaaggaaatgcatgtgtgccctgagccgtgatgatcctcccatccgtgttgtgagcacaggcatttgtgtctggtctgtcctccctgttgattggtctggcatttccggtattaaaatgataaaataaatggcattttctgaaaaaaaaaaaaaaaaaa

SEQ ID NO: 286 - DNA, 1180 bp, Homo sapiens
  ref <308>: DATABASE ACCESSION NUMBER: NCBI / NM_001694
  ref <309>: DATABASE ENTRY DATE: 2011-11-06
  ref <313>: RELEVANT RESIDUES IN SEQ ID NO: (1)..(1180)
acgcgtctcccccacggtgcgaagtggtacggctcgcaggggcggggcccaggtcatgtgacgcggccgcggccgccattttgttctgcggtgctggtatttagagcgcagcggctgacgggccggatcgccttcgccgccgcccgcccgcaaaccttcgtgcccggcccgtcctcgcccccgcctccgccaccgcctcggcccgcagagcttgccccctccccacccgcagacatgtccgagtccaagagcggccccgagtatgcttcgtttttcgccgtcatgggcgcctcggccgccatggtcttcagcgccctgggcgctgcctatggcacagccaagagcggtaccggcattgcggccatgtctgtcatgcggccggagcagatcatgaagtccatcatcccagtggtcatggctggcatcatcgccatctacggcctggtggtggcagtcctcatcgccaactccctgaatgacgacatcagcctctacaagagcttcctccagctgggcgccggcctgagcgtgggcctgagcggcctggcagccggctttgccatcggcatcgtgggggacgctggcgtgcggggcaccgcccagcagccccgactattcgtgggcatgatcctgattctcatcttcgccgaggtgctcggcctctacggtctcatcgtcgccctcatcctctccacaaagtagaccctctccgagcccaccagccacagaatattatgtaaagaccacccctcctcattccagaacgaacagcctgacacatacgcacggggccgccgcccccagtagttggtcttgtacatgcgcagtgtcctagtgcccatcgtctgtttccccggccttgcccccgcccgccccgtgccgtggacatctgggcccactcatcgcccctccaggcccccggcgccccaccccctagagtgctctgtgtatgcggatgatttagaattgtcatttctctttactggatgtttatttataaagatctggcctgttcctgcgtctgcggagcggcccttgtctcccagctatctataaccttagctagagtgtcgccttgtgggttcctgttgctgagacttcctggatggagccgccctcaccgccgggcccgtggccctgcgcggagctgtgtccaataaagttcttggatgtgacgggc

SEQ ID NO: 287 - DNA, 1028 bp, Homo sapiens
  ref <308>: DATABASE ACCESSION NUMBER: NCBI / NM_004047
  ref <309>: DATABASE ENTRY DATE: 2011-11-21
  ref <313>: RELEVANT RESIDUES IN SEQ ID NO: (1)..(1028)
gagttaggtgacgctgcggggcgggcggacagactgcgggacggacggtggacgctgggacgcgtttgtagctccggccccgccgttccgacccccgccgccgtcgccgccatgacggggctagcactgctctactccggggtcttcgtggccttctgggcctgcgcgctggccgtgggagtctgctacaccatttttgatttgggcttccgctttgatgtggcatggttcctgacggagacttcgcccttcatgtggtccaacctgggcattggcctagctatctccctgtctgtggttggggcagcctggggcatctatattaccggctcctccatcattggtggaggagtgaaggcccccaggatcaagaccaagaacctggtcagcatcatcttctgtgaggctgtggccatctacggcatcatcatggcaattgtcattagcaacatggctgagcctttcagtgccacagaccccaaggccatcggccatcggaactaccatgcaggctactccatgtttggggctggcctcaccgtaggcctgtctaacctcttctgtggagtctgcgtgggcatcgtgggcagtggggctgccctggccgatgctcagaaccccagcctctttgtaaagattctcatcgtggagatctttggcagcgccattggcctctttggggtcatcgtcgcaattcttcagacctccagagtgaagatgggtgactagatgatatgtgtgggtggggccgtgcctcacttttatttattgctggttttcctgggacagctggagctgtgtcccttagcctttcagaggcttggtgttcagggccctccctgcactcccctcttgctgcgtgttgatttggaggcactgcagtccaggccgagtcctcagtgcggggagcaggctgctgctgctgactctgtgcagctgcgcacctgtgtcccccacctccaccctcaacccatcttcctagtgtttgtgaaataaacttggtatttgtctgggtcagtgcaaaaaaa

SEQ ID NO: 288 - DNA, 1406 bp, Homo sapiens
  ref <308>: DATABASE ACCESSION NUMBER: NCBI / NM_001696
  ref <309>: DATABASE ENTRY DATE: 2011-11-28
  ref <313>: RELEVANT RESIDUES IN SEQ ID NO: (1)..(1406)
ctcttcccattggctgagaagggtcatgaggatgaactgtgcagtcacctggcaggaaccggaacccgcggttataaagtaaaggaacccgagatctgcgcaggggttccctttgccgatttctctcacctcacctttcaaacctaaactcgagcctactgttcaccggcctagcattgctctcgccatggctctcagcgatgctgacgtgcaaaagcagataaagcatatgatggctttcattgaacaagaagccaatgagaaagcagaagaaatagatgcaaaggcagaagaagagttcaacatagagaaaggtcggcttgtgcaaacccaaagactaaagattatggaatattatgagaagaaagagaaacagattgagcagcagaagaaaattcagatgtccaatttgatgaatcaagcgagactcaaagtcctcagagcaagagatgaccttatcacagacctactaaatgaagcaaaacagagactcagcaaggtggtaaaagatacaaccaggtaccaagtgctgctggatggactggttctccagggtttgtaccagttgctggagccccgaatgattgttcgttgcaggaaacaagatttccctctggtaaaggctgcagtgcagaaggcaattcctatgtacaaaattgccaccaaaaacgatgttgatgtccaaattgaccaggagtcctacctgcctgaagacatagctggtggagttgagatctataatggagatcgtaaaataaaggtttccaacaccctggaaagccggctggatctcatagcccagcagatgatgccagaagtccggggagccttgtttggtgcaaatgccaacaggaagtttttggactaagccttcaggaggtggagctcgtcgtcagctctcctgctgtgatgtggaagcttctgatatttgaagaaacacgaatgtctctgtagcttcctcttcactgccccagtattgctctgtatttatcagcgatgcccctctgtcactcatgccttgcctaattgttcacaatggtggaaagcttcatgtaatatgatcaggacccacctccagttcttctgaaagtgtgacagtgtccagccggttctgcagcactaggggagggggcagatggtggttgcatgggcttcctgggtctccactctccgtctggcctaaaggtgatgtatttggtgtttggccctgcagtccccactcttgaggcttaaggcgcatgtggcacaccactccttccagcagtagtcgctttactgttacctgtttaggcctagaagttttccctcatctgtaaatgtgatttaaaatctaagccatgaatatgctttatttattaaaagagttatgcggatttaatgtgatttctagtgtaaggcactacaaa

SEQ ID NO: 289 - DNA, 708 bp, Homo sapiens
  ref <308>: DATABASE ACCESSION NUMBER: NCBI / NM_001865
  ref <309>: DATABASE ENTRY DATE: 2011-11-27
  ref <313>: RELEVANT RESIDUES IN SEQ ID NO: (1)..(708)
agagcggatagagccgtactgccgctctagtttttcttttgctctctatggttaggagcgcaagcctctcttcggcccggaaagatttaagttcgtgaatgcatacgcaagactcggaggtagttccggttccggcgtggccattttcgttggtggtgttcagttgtggcggttgctggtcagtaacagccaagatgctgcggaatctgctggctcttcgtcagattgggcagaggacgataagcactgcttcccgcaggcattttaaaaataaagttccggagaagcaaaaactgttccaggaggatgatgaaattccactgtatctaaagggtggggtagctgatgccctcctgtatagagccaccatgattcttacagttggtggaacagcatatgccatatatgagctggctgtggcttcatttcccaagaagcaggagtgacttcagtcatcccagcaatcgcttggttcagtttcattcagctctctatggaccagtaatctgataaataaccgagctcttctttggggatcaatatttattgacttgtagtaactgccaccaataaagcagtctttaccatgctttgtctgattttatcactttatgccaataatttcaacttttggtcagccttgtaaatcttaggtaaggatcaaagaaatgattcttttgccactaaacttgtgaaagcaaaaaaaaa

SEQ ID NO: 290 - DNA, 593 bp, Homo sapiens
  ref <308>: DATABASE ACCESSION NUMBER: NCBI / NM_004373
  ref <309>: DATABASE ENTRY DATE: 2011-12-31
  ref <313>: RELEVANT RESIDUES IN SEQ ID NO: (1)..(593)
acttccgcttccggcgctgcggcagtccagatcaaaaatggcggtagttggtgtgtcctcggtttctcggctgctgggtcggtcccgcccacagctggggcggcctatgtcgagtggcgcccatggcgaagagggctcagctcgcatgtggaagactctcaccttcttcgtcgcgctccccggggtggcagtcagcatgctgaatgtgtacctgaagtcgcaccacggagagcacgagagacccgagttcatcgcctacccccatctccgcatcaggaccaagccgtttccctggggagatggtaaccatactctattccataaccctcatgtgaatccacttccaactggctacgaagatgaataaagagaatctggaccactacccgggcaccagggaccacagcactggtttggaccgttactctgcacatggaccagaaaaagtatatgggaccttaagctcaccttctttacttgtatcaaatgatgactggtatactggtctcccatccctttgcttgtggcaggagatggcttaaataaataacttaaatttagattggtcatgaaaaaaaaaaaaaaaaaaaaaa

SEQ ID NO: 291 - DNA, 1643 bp, Homo sapiens
  ref <308>: DATABASE ACCESSION NUMBER: NCBI / NM_000801
  ref <309>: DATABASE ENTRY DATE: 2011-11-12
  ref <313>: RELEVANT RESIDUES IN SEQ ID NO: (1)..(1643)
tttccgggacgtcgcgcgccgtgtggggcgcgcacgcagggctgggcgtgagggggcgtgcgcgtgcgcaggcgacgcgccgaggtactaggcagagccgtggaaccgccgccaggtcgctgttggtccacgccgcccgtcgcgccgcccgcccgctcagcgtccgccgccgccatgggagtgcaggtggaaaccatctccccaggagacgggcgcaccttccccaagcgcggccagacctgcgtggtgcactacaccgggatgcttgaagatggaaagaaatttgattcctcccgggacagaaacaagccctttaagtttatgctaggcaagcaggaggtgatccgaggctgggaagaaggggttgcccagatgagtgtgggtcagagagccaaactgactatatctccagattatgcctatggtgccactgggcacccaggcatcatcccaccacatgccactctcgtcttcgatgtggagcttctaaaactggaatgacaggaatggcctcctcccttagctccctgttcttggatctgccatggagggatctggtgcctccagacatgtgcacatgaatccatatggagcttttcctgatgttccactccactttgtatagacatctgccctgactgaatgtgttctgtcactcagctttgcttccgacacctctgtttcctcttcccctttctcctcgtatgtgtgtttacctaaactatatgccataaacctcaagttattcattttattttgttttcattttggggtgaagattcagtttcagtcttttggatataggtttccaattaagtacatggtcaagtattaacagcacaagtggtaggttaacattagaataggaattggtgttggggggggggtttgcaagaatattttattttaattttttggatgaaatttttatctattatatattaaacattcttgctgctgcgctgcaaagccatagcagatttgaggcgctgttgaggactgaattactctccaagttgagagatgtctttgggttaaattaaaagccctacctaaaactgaggtggggatggggagagcctttgcctccaccattcccacccaccctccccttaaaccctctgcctttgaaagtagatcatgttcactgcaatgctggacactacaggtatctgtccctgggccagcagggacctctgaagccttctttgtggccttttttttttttcatcctgtggtttttctaatggactttcaggaattttgtaatctcataactttccaagctccaccacttcctaaatcttaagaactttaattgacagtttcaattgaaggtgctgtttgtagacttaacacccagtgaaagcccagccatcatgacaaatccttgaatgttctcttaagaaaatgatgctggtcatcgcagcttcagcatctcctgttttttgatgcttggctccctctgctgatctcagtttcctggcttttcctccctcagccccttctcacccctttgctgtcctgtgtagtgatttggtgagaaatcgttgctgcacccttcccccagcaccatttatgagtctcaagttttattattgcaataaaagtgctttatgccggcttttctcagaaaaaaaaaa

SEQ ID NO: 292 - DNA, 737 bp, Homo sapiens
  ref <308>: DATABASE ACCESSION NUMBER: NCBI / NM_000992
  ref <309>: DATABASE ENTRY DATE: 2011-11-20
  ref <313>: RELEVANT RESIDUES IN SEQ ID NO: (1)..(737)
ttccggcgttgttgaccctatttcccgtgctgcaccgcagcccctttctcttccggttctaggcgcttcgggagccgcggcttatggtgcagacatggccaagtccaagaaccacaccacacacaaccagtcccgaaaatggcacagaaatggtatcaagaaaccccgatcacaaagatacgaatctcttaagggggtggaccccaagttcctgaggaacatgcgctttgccaagaagcacaacaaaaagggcctaaagaagatgcaggccaacaatgccaaggccatgagtgcacgtgccgaggctatcaaggccctcgtaaagcccaaggaggttaagcccaagatcccaaagggtgtcagccgcaagctcgatcgacttgcctacattgcccaccccaagcttgggaagcgtgctcgtgcccgtattgccaaggggctcaggctgtgccggccaaaggccaaggccaaggccaaggccaaggatcaaaccaaggcccaggctgcagccccagcttcagttccagctcaggctcccaaacgtacccaggcccctacaaaggcttcagagtagatatctctgccaacatgaggacagaaggactggtgcgaccccccacccccgcccctgggctaccatctgcatggggctggggtcctcctgtgctatttgtacaaataaacctgaggcaggaaaaaaaaaaaaaaaaaaaaaaaaaaaaaaaaaaaaaaaaaaa

SEQ ID NO: 293 - DNA, 514 bp, Homo sapiens
  ref <308>: DATABASE ACCESSION NUMBER: NCBI / NM_000988
  ref <309>: DATABASE ENTRY DATE: 2011-11-26
  ref <313>: RELEVANT RESIDUES IN SEQ ID NO: (1)..(514)
tccttctttcctttttgctggtagggccgggtggttgctgccgaaatgggcaagttcatgaaacctgggaaggtggtgcttgtcctggctggacgctactccggacgcaaagctgtcatcgtgaagaacattgatgatggcacctcagatcgcccctacagccatgctctggtggctggaattgaccgctacccccgcaaagtgacagctgccatgggcaagaagaagatcgccaagagatcaaagataaaatcttttgtgaaagtgtataactacaatcacctaatgcccacaaggtactctgtggatatccccttggacaaaactgtcgtcaataaggatgtcttcagagatcctgctcttaaacgcaaggcccgacgggaggccaaggtcaagtttgaagagagatacaagacaggcaagaacaagtggttcttccagaaactgcggttttagatgctttgttttgatcattaaaaattataaagaaaaaaaaaaaaaaaaaaaaaaaaaa

SEQ ID NO: 294 - DNA, 511 bp, Homo sapiens
  ref <308>: DATABASE ACCESSION NUMBER: NCBI / NM_001004
  ref <309>: DATABASE ENTRY DATE: 2011-12-17
  ref <313>: RELEVANT RESIDUES IN SEQ ID NO: (1)..(511)
ggtttaaccccgcctcttgcgtcggcgccttccttttcctccctgtcgccaccgaggtcgcacgcgtgagacttctccgccgcctccgccgcagacgccgccgcgatgcgctacgtcgcctcctacctgctggctgccctagggggcaactcctcccccagcgccaaggacatcaagaagatcttggacagcgtgggtatcgaggcggacgacgaccggctcaacaaggttatcagtgagctgaatggaaaaaacattgaagacgtcattgcccagggtattggcaagcttgccagtgtacctgctggtggggctgtagccgtctctgctgccccaggctctgcagcccctgctgctggttctgcccctgctgcagcagaggagaagaaagatgagaagaaggaggagtctgaagagtcagatgatgacatgggatttggcctttttgattaaattcctgctcccctgcaaataaagcctttttacacatctcaaaaaaaaaaaaaaaaaa

SEQ ID NO: 295 - DNA, 512 bp, Homo sapiens
  ref <308>: DATABASE ACCESSION NUMBER: NCBI / NM_001003
  ref <309>: DATABASE ENTRY DATE: 2011-11-20
  ref <313>: RELEVANT RESIDUES IN SEQ ID NO: (1)..(512)
cctttcctcagctgccgccaaggtgctcggtccttccgaggaagctaaggctgcgttggggtgaggccctcacttcatccggcgactagcaccgcgtccggcagcgccagccctacactcgcccgcgccatggcctctgtctccgagctcgcctgcatctactcggccctcattctgcacgacgatgaggtgacagtcacggaggataagatcaatgccctcattaaagcagccggtgtaaatgttgagcctttttggcctggcttgtttgcaaaggccctggccaacgtcaacattgggagcctcatctgcaatgtaggggccggtggacctgctccagcagctggtgctgcaccagcaggaggtcctgccccctccactgctgctgctccagctgaggagaagaaagtggaagcaaagaaagaagaatccgaggagtctgatgatgacatgggctttggtctttttgactaaacctcttttataacatgttcaataaaaagctgaacttt

SEQ ID NO: 296 - DNA, 3690 bp, Homo sapiens
  ref <308>: DATABASE ACCESSION NUMBER: NCBI / NM_000405
  ref <309>: DATABASE ENTRY DATE: 2011-11-16
  ref <313>: RELEVANT RESIDUES IN SEQ ID NO: (1)..(3690)
aatcggtccaattctcggccgggaagtctctggccgggacggggcagggcgaacctgccagtgactggactcagcttctttgcgtaaccaatactggaaggcatttaaaggcacctctgccgccacagaccttgcagttaactccgccctgacccacccttcccgatgcagtccctgatgcaggctcccctcctgatcgccctgggcttgcttctcgcggcccctgcgcaagcccacctgaaaaagccatcccagctcagtagcttttcctgggataactgtgatgaagggaaggaccctgcggtgatcagaagcctgactctggagcctgaccccatcatcgttcctggaaatgtgaccctcagtgtcatgggcagcaccagtgtccccctgagttctcctctgaaggtggatttagttttggagaaggaggtggctggcctctggatcaagatcccatgcacagactacattggcagctgtacctttgaacacttctgtgatgtgcttgacatgttaattcctactggggagccctgcccagagcccctgcgtacctatgggcttccttgccactgtcccttcaaagaaggaacctactcactgcccaagagcgaattcgttgtgcctgacctggagctgcccagttggctcaccaccgggaactaccgcatagagagcgtcctgagcagcagtgggaagcgtctgggctgcatcaagatcgctgcctctctaaagggcatataacatggcatctgccacagcagaatggagcggtgtgaggaaggtcccttttcctctgttttgtgtttgccaaggccaaactcccactctctgcccccctttaatcccctttctacagtgagtccactaccctcactgaaaatcattttgtaccacttacattttaggctggggcaagcagccctgacctaagggagaatgagttggacagttcttgatagcccagggcatctgctgggctgaccacgttactcatccccgttaacattctctctaaagagcctcgttcatttccaaagcagttaaggaatgggaaccagagtgttttaggacctgaagaatctttatgactctctctctttcactcttttttttttttgtcactaagttaaaagcgaagtgagagtattaacgtttttgttctcctccggccccctgttacaatgaaggggcaaaagtatttgctcttagtctattcctcccttaacttctgtgactaatttttatttcctttctagatttgcccaattaatactagggtgcagtgtatcctggagaggtagggtgtgtgggggaggaatcccttgggggagatattaggagtgctctgttgtttacaaactcaggtacccgcagggcctagcaagagacttaaatgactgataagaaccgtgagaaacatgttgcttccaggcttgatttcgatttttcgctttttttttttttgagacagaatctcactttgtcaccaggctggagtgcagtggtgcaatctcacctcactgcaacctccgcctcctgggttcaagcaattctcctgcctcagcctcccaagtagcttggactacaggccctgccaccacgcccggctaatttgtgtatttttagtagagatggggtttcaccatgttggccaggatggtctcgatctcttgacctcgtgatctgtccaccttggccttgcaaagcgctggattacaggcatgagccactacacccagccgatttttcctttttgattaaagatgctattacaatgtaaatatttcttacacagaaagtcacagcacatgtgcccattgatacaaggctgctgaggcctggtctccagttggaaatataattaagggtggcaaggactggagtcagttggagagtgcatagccagtctgtgaagacaactgccagatactggcaatactccagcctggtgacagagtgagactctgtctcaaaaaaaaagtttcaatgtttactcctagagaagccaaaaatccagatttgtatatgaaatcttaccattttaaaagattggcagctaattatttttttaaaaagctgtgcagtgtgatgtgtcccaaacggactggctcatgggtggccacgtcacaacctctgatctcagaccgtgcatgccttgtcctcttaagacaactcctgtggcaccgtttctccctccacagggccaaagccatagtgtccggtcccaaggacaaggctcttccagtgctaggagaggtatgagcagcctctcacctgtgagctgtggggatcacaaggctgcctgcctcagtcttggagtcctgttgggtgaatgaggcagatgggaaagagcctcaccagcagctgcttttggagcaggggtccaaggaagagagggtggcctcgacatcaaactgcctggatttttctaccaccctgttacatcataacaacttctgaaacacacaccagccctgagttctgggctcatttgaagcctggaatagcaataaatctttttaacttgcggacagtttccccttgccttggctgcatatttcactgatcacatctcaggatttcaaaagcatttttggggtggggctcttttggttggaagggtttgttggaacggtacaggtgagccgaggtgattccagggacggacccttctgcaggagcttgagcttgcttgttgtctctgcttcatcgccatccagctcccttgtttgctattttgctttccatcacatcatgactgcggagagcaaaaatcacctagtgaccattgaacaggtcccagagacaaaatctttttatctgaggaatttaaaagggagcaaagaccacctggtgactatcaggccatgcagaggcaaaacgccttatttggggaaaattaaaagtaattagactttcctattatctaaagcaggcatctggttccagatttcttttccccgaaaaaaaccttagaagtaactaaaatttctgtacatctccggaatgccatgctgaaactcactgcaaccccacggtcccgctttaaggtccataaatatccctaaggaaaaatccaccgtggtacattcagtcctctcaccgaggtgccccatggcagtcttctgcagcattcttctaatacctttcctttttcaaacctatactgttgttggtgaattctttttaccaacccacgagttgaccacttcccaatgccggggatctgacacctcacctggcaatgacctccacagccgtttccctctgttggatcttccagccttattctcaacagttcatttttagttcacattcttgaccgaatctcagtagctcagttaatctttttatgtctgctctgctcttgggtcatatgttccgtgaggtttcttaggggtgggggatgaggagttaaaggtggcatcttcaatcgcaggtcaaagcagactttaataaatggtgctgagccaactggaaagccccttggagaaagttgaagttagacctgtacttcacaccatatgcaagaatgaactccatctggatccaggatccaaatgtaagaaaatgaagccatataaatacagaaggaaacgtggtggaaatatccagtggcaacaaaatattgacacatttgactacatgaagataataaaaatgcttagtaaaaacacaataaaa

SEQ ID NO: 297 - DNA, 1348 bp, Homo sapiens
  ref <308>: DATABASE ACCESSION NUMBER: NCBI / NM_000967
  ref <309>: DATABASE ENTRY DATE: 2011-12-18
  ref <313>: RELEVANT RESIDUES IN SEQ ID NO: (1)..(1348)
ccagatttggctttatatagcggacccgtaaggccgaccggcctctaccggcgggatttgatggcgtgatgtctcacagaaagttctccgctcccagacatgggtccctcggcttcctgcctcggaagcgcagcagcaggcatcgtgggaaggtgaagagcttccctaaggatgacccgtccaagccggtccacctcacagccttcctgggatacaaggctggcatgactcacatcgtgcgggaagtcgacaggccgggatccaaggtgaacaagaaggaggtggtggaggctgtgaccattgtagagacaccacccatggtggttgtgggcattgtgggctacgtggaaacccctcgaggcctccggaccttcaagactgtctttgctgagcacatcagtgatgaatgcaagaggcgtttctataagaattggcataaatctaagaagaaggcctttaccaagtactgcaagaaatggcaggatgaggatggcaagaagcagctggagaaggacttcagcagcatgaagaagtactgccaagtcatccgtgtcattgcccacacccagatgcgcctgcttcctctgcgccagaagaaggcccacctgatggagatccaggtgaacggaggcactgtggccgagaagctggactgggcccgcgagaggcttgagcagcaggtacctgtgaaccaagtgtttgggcaggatgagatgatcgacgtcatcggggtgaccaagggcaaaggctacaaaggggtcaccagtcgttggcacaccaagaagctgccccgcaagacccaccgaggcctgcgcaaggtggcctgtattggggcatggcatcctgctcgtgtagccttctctgtggcacgcgctgggcagaaaggctaccatcaccgcactgagatcaacaagaagatttataagattggccagggctaccttatcaaggacggcaagctgatcaagaacaatgcctccactgactatgacctatctgacaagagcatcaaccctctgggtggctttgtccactatggtgaagtgaccaatgactttgtcatgctgaaaggctgtgtggtgggaaccaagaagcgggtgctcaccctccgcaagtccttgctggtgcagacgaagcggcgggctctggagaagattgaccttaagttcattgacaccacctccaagtttggccatggccgcttccagaccatggaggagaagaaagcattcatgggaccactgaagaaagaccgaattgcaaaggaagaaggagcttaatgccaggaacagattttgcagttggtggggtctcaataaaagttattttccactgacaaaaaaaaaaa

SEQ ID NO: 298 - DNA, 2204 bp, Homo sapiens
  ref <308>: DATABASE ACCESSION NUMBER: NCBI / NM_001428
  ref <309>: DATABASE ENTRY DATE: 2012-01-01
  ref <313>: RELEVANT RESIDUES IN SEQ ID NO: (1)..(2204)
gtggggccccagagcgacgctgagtgcgtgcgggactcggagtacgtgacggagccccgagctctcatgcccgccacgccgccccgggccatcccccggagccccggctccgcacaccccagttcggctcaccggtcctatctggggccagagtttcgcccgcaccactacagggccgctggggagtcggggccccccagatctgcccgcctcaagtccgcgggacgtcacccccctttccacgctactgcagccgtcgcagtcccacccctttccgggaggtgagggaatgagtgacggctctcccgacgaatggcgaggcggagctgagggggcgtgccccggaggcgggaagtgggtggggctcgccttagctaggcaggaagtcggcgcgggcggcgcggacagtatctgtgggtacccggagcacggagatctcgccggctttacgttcacctcggtgtctgcagcaccctccgcttcctctcctaggcgacgagacccagtggctagaagttcaccatgtctattctcaagatccatgccagggagatctttgactctcgcgggaatcccactgttgaggttgatctcttcacctcaaaaggtctcttcagagctgctgtgcccagtggtgcttcaactggtatctatgaggccctagagctccgggacaatgataagactcgctatatggggaagggtgtctcaaaggctgttgagcacatcaataaaactattgcgcctgccctggttagcaagaaactgaacgtcacagaacaagagaagattgacaaactgatgatcgagatggatggaacagaaaataaatctaagtttggtgcgaacgccattctgggggtgtcccttgccgtctgcaaagctggtgccgttgagaagggggtccccctgtaccgccacatcgctgacttggctggcaactctgaagtcatcctgccagtcccggcgttcaatgtcatcaatggcggttctcatgctggcaacaagctggccatgcaggagttcatgatcctcccagtcggtgcagcaaacttcagggaagccatgcgcattggagcagaggtttaccacaacctgaagaatgtcatcaaggagaaatatgggaaagatgccaccaatgtgggggatgaaggcgggtttgctcccaacatcctggagaataaagaaggcctggagctgctgaagactgctattgggaaagctggctacactgataaggtggtcatcggcatggacgtagcggcctccgagttcttcaggtctgggaagtatgacctggacttcaagtctcccgatgaccccagcaggtacatctcgcctgaccagctggctgacctgtacaagtccttcatcaaggactacccagtggtgtctatcgaagatccctttgaccaggatgactggggagcttggcagaagttcacagccagtgcaggaatccaggtagtgggggatgatctcacagtgaccaacccaaagaggatcgccaaggccgtgaacgagaagtcctgcaactgcctcctgctcaaagtcaaccagattggctccgtgaccgagtctcttcaggcgtgcaagctggcccaggccaatggttggggcgtcatggtgtctcatcgttcgggggagactgaagataccttcatcgctgacctggttgtggggctgtgcactgggcagatcaagactggtgccccttgccgatctgagcgcttggccaagtacaaccagctcctcagaattgaagaggagctgggcagcaaggctaagtttgccggcaggaacttcagaaaccccttggccaagtaagctgtgggcaggcaagcccttcggtcacctgttggctacacagacccctcccctcgtgtcagctcaggcagctcgaggcccccgaccaacacttgcaggggtccctgctagttagcgccccaccgccgtggagttcgtaccgcttccttagaacttctacagaagccaagctccctggagccctgttggcagctctagctttgcagtcgtgtaattggcccaagtcattgtttttctcgcctcactttccaccaagtgtctagagtcatgtgagcctcgtgtcatctccggggtggccacaggctagatccccggtggttttgtgctcaaaataaaaagcctcagtgacccatgagaataaaaaaaaaaaaaaaaaa

SEQ ID NO: 299 - DNA, 411 bp, Homo sapiens
  ref <308>: DATABASE ACCESSION NUMBER: NCBI / NM_000999
  ref <309>: DATABASE ENTRY DATE: 2011-11-19
  ref <313>: RELEVANT RESIDUES IN SEQ ID NO: (1)..(411)
gcccggaaacggaagtctcgttctttttcgtccttttccccggttgctgcttgctgtgagtgtctctagggtgatacgtgggtgagaaaggtcctggtccgcgccagagcccagcgcgcctcgtcgccatgcctcggaaaattgaggaaatcaaggacttcctgctcacagcccgacgaaaggatgccaaatctgtcaagatcaagaaaaataaggacaacgtgaagtttaaagttcgatgcagcagatacctttacaccctggtcatcactgacaaagagaaggcagagaaactgaagcagtccctgccccccggtttggcagtgaaggaactgaaatgaaccagacacactgattggaactgtattatattaaaatactaaaaatcctaaaaaaaaaaaaaaaaaaaaa

SEQ ID NO: 300 - DNA, 1586 bp, Homo sapiens
  ref <308>: DATABASE ACCESSION NUMBER: NCBI / NM_000997
  ref <309>: DATABASE ENTRY DATE: 2011-11-19
  ref <313>: RELEVANT RESIDUES IN SEQ ID NO: (1)..(1586)
gcgccccgcaggaagtgcttccctgggcggaagcttctgagcgtgatatagcggaagtgccttctcttccggtctttctggtctcggccgcagaagcgagatgacgaagggaacgtcatcgtttggaaagcgtcgcaataagacgcacacgttgtgccgccgctgtggctctaaggcctaccaccttcagaagtcgacctgtggcaaatgtggctaccctgccaagcgcaagagaaagtataactggagtgccaaggctaaaagacgaaataccaccggaactggtcgaatgaggcacctaaaaattgtataccgcagattcaggcatggattccgtgaaggaacaacacctaaacccaagagggcagctgttgcagcatccagttcatcttaagaatgtcaacgattagtcatgcaataaatgttctggttttaaaaaatacatatctggttttggtaaggtatttttaatcaattaggcttgtagtatcagtgaaatactgtaggtttagggactgggctagcttcatatcagatttacttgttaagtgactgttttggaatgtttacttttggactgggtttgtaacacggttaaaggcaatgagaaacaagcagaattccaggagtccttgaagcagagggcactggaagacaatatagcagattaaaatagcacagctcatgtggcataggtgggtattttagatgtttgagtaaatttgaaagagtatgatgtttaaattacctttagcaacatgttcatctgctatgctgtcatgactagggggatgattattagtcacatagagcttgggagtaccactggaaacgtatgggtaggagtttaggtggcttctgtttttcaaaagatgatcttatcctagtatctgtaatgctcacttggcacacctgacttgtgggctgtgtgtaaggtggctagctaagtgaaaaaagcctgctaggtgtgagtcaacttaagaatatgtaaataggtttgagaaaaagtagggcttgggtgcaagtaaagattgagcaggaaataaaggaaaatcaagtataatccctgagatttgtagactaaaggcaatgatgtgggactacttggtcgaatttttttagccctcaacttggtaattgggtgtttctgtgttaaagcactgaaacttgctgtcgtgccttcctagttttcgtggtttattgacagggttgggggttttttttgtttttttaaaatgaagggacaaagtcaactggactgctgagtgagagggcaggggcagttgaagggaacatgaattgctggaacagctacataaaatagtgatgtagccaagtcatgctatttaaattataattctccactgtgtttagaataacatctgaggttcttaacctggccttggaagggtatcacttttacttgtaacctggaatggctttataatgtgctagctaattgctactctcatcttgtattttaactcctaatttacccttcaggtctcagcttcagaacattcacttataaagaaaccctgctgattaaatctctcttgggcttcctcccaaaaaaaaaaaaaaaa

SEQ ID NO: 301 - DNA, 918 bp, Homo sapiens
  ref <308>: DATABASE ACCESSION NUMBER: NCBI / NM_000995
  ref <309>: DATABASE ENTRY DATE: 2011-11-21
  ref <313>: RELEVANT RESIDUES IN SEQ ID NO: (1)..(918)
cttttttcttcctcttccggggacgttgtctgcaggcactcagaatggtccagcgtttgacataccgacgtaggctttcctacaatacagcctctaacaaaactaggctgtcccgaacccctggtaatagaattgtttacctttataccaagaaggttgggaaagcaccaaaatctgcatgtggtgtgtgcccaggcagacttcgaggggttcgtgctgtaagacctaaagttcttatgagattgtccaaaacaaagaaacatgtcagcagggcctatggtggttccatgtgtgctaaatgtgttcgtgacaggatcaagcgtgctttccttatcgaggagcagaaaatcgttgtgaaagtgttgaaggcacaagcacagagtcagaaagctaaataaaaaaatgaaacttttttgagtaataaaaatgaaaagacgctgtccaatagaaaaagttggtgtgctggagctacctcacctcagcttgagagagccagttgtgtgcatctctttccagttttgcatccagtgacgtctgcttggcatcttgagattgttatggtgagagtatttacacctcagcaaatgctgcaaaatcctgttttcccccagagagctggaggttaaatactaccagcacatccctagatactactcaagttacagtatatgatcactaatatagtatgctcttggtaccaggagctctgatatatatctggtacatgtttgataatgacttgattgttattataagtacttattaatacttcgattctgtaaagagtttagggtttgattttataaaatccaaaatgagccttttattgaatccagttctctatgtgaccagttctctgtatgaatggaagggaaaagaattaaaaatcttgcaaaggggaaaaaaaaaaaaaaaaaa

SEQ ID NO: 302 - DNA, 2350 bp, Homo sapiens
  ref <308>: DATABASE ACCESSION NUMBER: NCBI / NM_002948
  ref <309>: DATABASE ENTRY DATE: 2011-12-24
  ref <313>: RELEVANT RESIDUES IN SEQ ID NO: (1)..(2350)
aaagacagcggctccaccgcggtacgcggccaccggctttggagcctggaccccaacttgcctcctctcgcggagagacagtcgccgacgctcgcttagccgccgagacctcgccgccaactctctcacctctcgagacgcccaggccgctcaggctcgaatcttgcggagcagggggcgggacaatagcggccgcggcgccccactcggcagaactccgccaccaggcgcgatgccggaactacatgtcccatgacgctctgggaggccgcagctttccaccggaaagagggtggctgaggtgggggaggagcccaaaaggcattgtgggagtacagctctttcctttccgtctggcggcagccatcaggtaagccaagatgggtgcatacaagtacatccaggagctatggagaaagaagcagtctgatgtcatgcgctttcttctgagggtccgctgctggcagtaccgccagctctctgctctccacagggctccccgccccacccggcctgataaagcgcgccgactgggctacaaggccaagcaaggttacgttatatataggattcgtgttcgccgtggtggccgaaaacgcccagttcctaagggtgcaacttacggcaagcctgtccatcatggtgttaaccagctaaagtttgctcgaagccttcagtccgttgcagaggagcgagctggacgccactgtggggctctgagagtcctgaattcttactgggttggtgaagattccacatacaaattttttgaggttatcctcattgatccattccataaagctatcagaagaaatcctgacacccagtggatcaccaaaccagtccacaagcacagggagatgcgtgggctgacatctgcaggccgaaagagccgtggccttggaaagggccacaagttccaccacactattggtggctctcgccgggcagcttggagaaggcgcaatactctccagctccaccgttaccgctaatataagtaaagtttgtaaaattcatacttaataaacaatttaggacagtcatgtctgcttacaggtgttatttgtctgttaaaactagtctgcagatgtttcttgaatgctttgtcaaattaagaaagttaaagtgcaataatgtttgaagacaataagtggtggtgtatcttgtttctaataagataaacttttttgtctttgctttatcttattagggagttgtatgtcagtgtataaaacatactgtgtggtataacaggcttaataaattctttaaaaggagagaactgaaactagccctgtagatttgtctggtgcatgtgatgaaacctgcagctttatcggagtgatggcaatgctctgctggtttattttcaagtggctgcgttttttttagtttggcaggtgtagactttttaagttgggctttagaaaatctgggttagcctgaagaaaattgcctcagcctccacagtaccattttaaattcacataaaaggtgaaagctcctggttcagtgccatggcttcatggcattcagtgattagtggtaatggtaaacactggtgtgttttgaagttgaatgtgcgataaaattattagccttaagattggtaagctagcaatgaatgctagggtgggaagctggtgagccagtggccattagataaatacctttcaagtgtgagcttagacgtcaaccctaaaatacttaaccgtaatgctaattgtgatcattatgaatcccttcagtcacattagggggaaagtagttggctataagtacgtcattcttagtccagtcagtcttaaaaacatcttgggttacccactctgtccactcccataggctacagaaaaagtcacaagcgcatggtttccaaccatatgtgttttctgcagttatttctcttgttctggccaaacaaccctaaaaatccttaccattccacaaagttggaccatcacttgtgcacccactttgactatgagtataccaccacattgcatttctgtttgcaccatgtcttccaggagactagactactgttgtccagggtcaatttgagtgtaaagaaaatgtagacaaggaattgcccaattttaaattctgactttgctgacttaatttaaatgctcgttctgaaccaattttctcctatcttctctaggggtttcaaaagactcagttaattgatttccaggaagtactcatagcaagttcataaaagttcttgagacctaaatttcttcacaaaaaaagaaaagatcttaagtcatacattttaattgtgtagaggttgttcaactgaaggaataaatgtctattaaactaaaacaaatggaccttc

SEQ ID NO: 303 - DNA, 962 bp, Homo sapiens
  ref <308>: DATABASE ACCESSION NUMBER: NCBI / NM_002952
  ref <309>: DATABASE ENTRY DATE: 2011-11-20
  ref <313>: RELEVANT RESIDUES IN SEQ ID NO: (1)..(962)
cttcttttccgacaaaacaccaaatggcggatgacgccggtgcagcgggggggcccgggggccctggtggccctgggatggggaaccgcggtggcttccgcggaggtttcggcagtggcatccggggccggggtcgcggccgtggacggggccggggccgaggccgcggagctcgcggaggcaaggccgaggataaggagtggatgcccgtcaccaagttgggccgcttggtcaaggacatgaagatcaagtccctggaggagatctatctcttctccctgcctattaaggaatcagagatcattgatttcttcctgggggcctctctcaaggatgaggttttgaagattatgccagtgcagaagcagacccgtgccggccagcgcaccaggttcaaggcatttgttgctatcggggactacaatggccacgtcggtctgggtgttaagtgctccaaggaggtggccaccgccatccgtggggccatcatcctggccaagctctccatcgtccccgtgcgcagaggctactgggggaacaagatcggcaagccccacactgtcccttgcaaggtgacaggccgctgcggctctgtgctggtacgcctcatccctgcacccaggggcactggcatcgtctccgcacctgtgcctaagaagctgctcatgatggctggtatcgatgactgctacacctcagcccggggctgcactgccaccctgggcaacttcgccaaggccacctttgatgccatttctaagacctacagctacctgacccccgacctctggaaggagactgtattcaccaagtctccctatcaggagttcactgaccacctcgtcaagacccacaccagagtctccgtgcagcggactcaggctccagctgtggctacaacatagggtttttatacaagaaaaataaagtgaattaagcgtgaaaaaaaaaaaaaaaaaaaa

SEQ ID NO: 304 - DNA, 649 bp, Homo sapiens
  ref <308>: DATABASE ACCESSION NUMBER: NCBI / NM_001026
  ref <309>: DATABASE ENTRY DATE: 2011-11-27
  ref <313>: RELEVANT RESIDUES IN SEQ ID NO: (1)..(649)
aggcatcggcgcggtcagcctcgtggcgcgcccacgcccccacgccggctcttcccggggtccttccgtgcgcgttgatatgattggccggcgaatcgtggttctcttttcctccttggctgtctgaagatagatcgccatcatgaacgacaccgtaactatccgcactagaaagttcatgaccaaccgactacttcagaggaaacaaatggtcattgatgtccttcaccccgggaaggcgacagtgcctaagacagaaattcgggaaaaactagccaaaatgtacaagaccacaccggatgtcatctttgtatttggattcagaactcattttggtggtggcaagacaactggctttggcatgatttatgattccctggattatgcaaagaaaaatgaacccaaacatagacttgcaagacatggcctgtatgagaagaaaaagacctcaagaaagcaacgaaaggaacgcaagaacagaatgaagaaagtcagggggactgcaaaggccaatgttggtgctggcaaaaagccgaaggagtaaaggtgctgcaatgatgttagctgtggccactgtggatttttcgcaagaacattaataaactaaaaacttcatgtgtctggttgtttgaaaaaaaaaaaaaaaaaa

SEQ ID NO: 305 - DNA, 603 bp, Homo sapiens
  ref <308>: DATABASE ACCESSION NUMBER: NCBI / NM_001020
  ref <309>: DATABASE ENTRY DATE: 2011-11-19
  ref <313>: RELEVANT RESIDUES IN SEQ ID NO: (1)..(603)
gaaaagcggccagggtggcccctagctttccttttccggttgcggcgccgcgcggtgaggttgtctagtccacgctcggagccatgccgtccaagggcccgctgcagtctgtgcaggtcttcggacgcaagaagacagcgacagctgtggcgcactgcaaacgcggcaatggtctcatcaaggtgaacgggcggcccctggagatgattgagccgcgcacgctacagtacaagctgctggagccagttctgcttctcggcaaggagcgatttgctggtgtagacatccgtgtccgtgtaaagggtggtggtcacgtggcccagatttatgctatccgtcagtccatctccaaagccctggtggcctattaccagaaatatgtggatgaggcttccaagaaggagatcaaagacatcctcatccagtatgaccggaccctgctggtagctgaccctcgtcgctgcgagtccaaaaagtttggaggccctggtgcccgcgctcgctaccagaaatcctaccgataagcccatcgtgactcaaaactcacttgtataataaacagtttttgagggattttaaagtttcaagaaaaaaaaaaaaaaa

SEQ ID NO: 306 - DNA, 531 bp, Homo sapiens
  ref <308>: DATABASE ACCESSION NUMBER: NCBI / NM_001018
  ref <309>: DATABASE ENTRY DATE: 2011-11-21
  ref <313>: RELEVANT RESIDUES IN SEQ ID NO: (1)..(531)
ggcagtctcgcgataactgcgcaggcgcggaccaaagcgatctcttctgaggatccggcaagatggcagaagtagagcagaagaagaagcggaccttccgcaagttcacctaccgcggcgtggacctcgaccagctgctggacatgtcctacgagcagctgatgcagctgtacagtgcgcgccagcggcggcggctgaaccggggcctgcggcggaagcagcactccctgctgaagcgcctgcgcaaggccaagaaggaggcgccgcccatggagaagccggaagtggtgaagacgcacctgcgggacatgatcatcctacccgagatggtgggcagcatggtgggcgtctacaacggcaagaccttcaaccaggtggagatcaagcccgagatgatcggccactacctgggcgagttctccatcacctacaagcccgtaaagcatggccggcccggcatcggggccacccactcctcccgcttcatccctctcaagtaatggctcagctaataaaggcgcacatgactcc

SEQ ID NO: 307 - DNA, 529 bp, Homo sapiens
  ref <308>: DATABASE ACCESSION NUMBER: NCBI / NM_001017
  ref <309>: DATABASE ENTRY DATE: 2011-11-20
  ref <313>: RELEVANT RESIDUES IN SEQ ID NO: (1)..(529)
cgctctcctttcgttgcctgatcgccgccatcatgggtcgcatgcatgctcccgggaagggcctgtcccagtcggctttaccctatcgacgcagcgtccccacttggttgaagttgacatctgacgacgtgaaggagcagatttacaaactggccaagaagggccttactccttcacagatcggtgtaatcctgagagattcacatggtgttgcacaagtacgttttgtgacaggcaataaaattttaagaattcttaagtctaagggacttgctcctgatcttcctgaagatctctaccatttaattaagaaagcagttgctgttcgaaagcatcttgagaggaacagaaaggataaggatgctaaattccgtctgattctaatagagagccggattcaccgtttggctcgatattataagaccaagcgagtcctccctcccaattggaaatatgaatcatctacagcctctgccctggtcgcataaatttgtctgtgtactcaagcaataaaatgattgtttaacta

SEQ ID NO: 308 - DNA, 1035 bp, Homo sapiens
  ref <308>: DATABASE ACCESSION NUMBER: NCBI / NM_000969
  ref <309>: DATABASE ENTRY DATE: 2011-11-20
  ref <313>: RELEVANT RESIDUES IN SEQ ID NO: (1)..(1035)
ggcccttttcccaccccctagcgccgctgggcctgcaggtctctgtcgagcagcggacgccggtctctgttccgcaggatggggtttgttaaagttgttaagaataaggcctactttaagagataccaagtgaaatttagaagacgacgagagggtaaaactgattattatgctcggaaacgcttggtgatacaagataaaaataaatacaacacacccaaatacaggatgatagttcgtgtgacaaacagagatatcatttgtcagattgcttatgcccgtatagagggggatatgatagtctgcgcagcgtatgcacacgaactgccaaaatatggtgtgaaggttggcctgacaaattatgctgcagcatattgtactggcctgctgctggcccgcaggcttctcaataggtttggcatggacaagatctatgaaggccaagtggaggtgactggtgatgaatacaatgtggaaagcattgatggtcagccaggtgccttcacctgctatttggatgcaggccttgccagaactaccactggcaataaagtttttggtgccctgaagggagctgtggatggaggcttgtctatccctcacagtaccaaacgattccctggttatgattctgaaagcaaggaatttaatgcagaagtacatcggaagcacatcatgggccagaatgttgcagattacatgcgctacttaatggaagaagatgaagatgcttacaagaaacagttctctcaatacataaagaacagcgtaactccagacatgatggaggagatgtataagaaagctcatgctgctatacgagagaatccagtctatgaaaagaagcccaagaaagaagttaaaaagaagaggtggaaccgtcccaaaatgtcccttgctcagaagaaggatcgggtagctcaaaagaaggcaagcttcctcagagctcaggagcgggctgctgagagctaaacccagcaattttctatgattttttcagatatagataataaacttatgaacagcaactaaaaa

SEQ ID NO: 309 - DNA, 985 bp, Homo sapiens
  ref <308>: DATABASE ACCESSION NUMBER: NCBI / NM_000985
  ref <309>: DATABASE ENTRY DATE: 2011-12-04
  ref <313>: RELEVANT RESIDUES IN SEQ ID NO: (1)..(985)
cctgcctcctcagatctcgtttcttcggctacgaatctcgcgagaagtcaagttctcatgagttctcccaaaatccaccgctcttcctctttccctaagcagcctgagggttgactggattggtgaggcccgtgtggctacttctgtggaagcagtgctgtagttactggaagataaaagggaaagcaagcccttggtgggggaaagtatggctgcgatgatggcatttcttaggacacctttggattaataatgaaaacaactactctctgagcagctgttcgaatcatctgatatttatactgaatgagttactgtaagtacgtattgacagaattacactgtactttcctctaggtgatctgtgaaaatggttcgctattcacttgacccggagaaccccacgaaatcatgcaaatcaagaggttccaatcttcgtgttcactttaagaacactcgtgaaactgctcaggccatcaagggtatgcatatacgaaaagccacgaagtatctgaaagatgtcactttacagaaacagtgtgtaccattccgacgttacaatggtggagttggcaggtgtgcgcaggccaagcaatggggctggacacaaggtcggtggcccaaaaagagtgctgaatttttgctgcacatgcttaaaaacgcagagagtaatgctgaacttaagggtttagatgtagattctctggtcattgagcatatccaagtgaacaaagcacctaagatgcgccgccggacctacagagctcatggtcggattaacccatacatgagctctccctgccacattgagatgatccttacggaaaaggaacagattgttcctaaaccagaagaggaggttgcccagaagaaaaagatatcccagaagaaactgaagaaacaaaaacttatggcacgggagtaaattcagcattaaaataaatgtaattaaaaggaaaagaaaaaaaaaaaaaaaaaaaaaaaa

SEQ ID NO: 310 - DNA, 6738 bp, Homo sapiens
  ref <308>: DATABASE ACCESSION NUMBER: NCBI / NM_000937
  ref <309>: DATABASE ENTRY DATE: 2011-11-13
  ref <313>: RELEVANT RESIDUES IN SEQ ID NO: (1)..(6738)
gagagcgcggccgggacggttggagaagaaggcggctcccggaagggggagagacaaactgccgtaacctctgccgttcaggaacccggttacttatttattcgttaccctttttcttcttcctcccccaaaaaccttttccttttcccttctttttttttcctttttgggagctgaaaaatttccggtaagggaaagaagggctcctttcgctccttatttccccgcctccttccctcccccaccttcccctcctccggctttttcctcccaactcggggaggtccttcccggtggccgccctgacgaggtctgagcacctaggcggaggcggcgcaggctttttgtagtgaggtttgcgcctgcgcagcgcgcctgcctccgccatgcacgggggtggccccccctcgggggacagcgcatgcccgctgcgcaccatcaagagagtccagttcggagtcctgagtccggatgaactgaagcgaatgtctgtgacggagggtggcatcaaatacccagagacgactgagggaggccgccccaagcttggggggctgatggacccgaggcagggggtgattgagcggactggccgctgccaaacatgtgcaggaaacatgacagagtgtcctggccactttggccacattgaactggccaagcctgtgtttcacgtgggcttcctggtgaagacaatgaaagttttgcgctgtgtctgcttcttctgctccaaactgcttgtggactctaacaacccaaagatcaaggatatcctggctaagtccaagggacagcccaagaagcggctcacacatgtctacgacctttgcaagggcaaaaacatatgcgagggtggggaggagatggacaacaagttcggtgtggaacaacctgagggtgacgaggatctgaccaaagaaaagggccatggtggctgtgggcggtaccagcccaggatccggcgttctggcctagagctgtatgcggaatggaagcacgttaatgaggactctcaggagaagaagatcctgctgagtccagagcgagtgcatgagatcttcaaacgcatctcagatgaggagtgttttgtgctgggcatggagccccgctatgcacggccagagtggatgattgtcacagtgctgcctgtgcccccgctctccgtgcggcctgctgttgtgatgcagggctctgcccgtaaccaggatgacctgactcacaaactggctgacatcgtgaagatcaacaatcagctgcggcgcaatgagcagaacggcgcagcggcccatgtcattgcagaggatgtgaagctcctccagttccatgtggccaccatggtggacaatgagctgcctggcttgccccgtgccatgcagaagtctgggcgtcccctcaagtccctgaagcagcggttgaagggcaaggaaggccgggtgcgagggaacctgatgggcaaaagagtggacttctcggcccgtactgtcatcacccccgaccccaacctctccattgaccaggttggcgtgccccgctccattgctgccaacatgacctttgcggagattgtcacccccttcaacattgacagacttcaagaactagtgcgcagggggaacagccagtacccaggcgccaagtacatcatccgagacaatggtgatcgcattgacttgcgtttccaccccaagcccagtgaccttcacctgcagaccggctataaggtggaacggcacatgtgtgatggggacattgttatcttcaaccggcagccaactctgcacaaaatgtccatgatggggcatcgggtccgcattctcccatggtctacctttcgcttgaatcttagtgtgacaactccgtacaatgcagactttgacggggatgagatgaacttgcacctgccacagtctctggagacgcgagcagagatccaggagctggccatggttcctcgcatgattgtcaccccccagagcaatcggcctgtcatgggtattgtgcaggacacactcacagcagtgcgcaaattcaccaagagagacgtcttcctggagcggggtgaagtgatgaacctcctgatgttcctgtcgacgtgggatgggaaggtcccacagccggccatcctaaagccccggcccctgtggacaggcaagcaaatcttctccctcatcatacctggtcacatcaattgtatccgtacccacagcacccatcccgatgatgaagacagtggcccttacaagcacatctctcctggggacaccaaggtggtggtggagaatggggagctgatcatgggcatcctgtgtaagaagtctctgggcacgtcagctggctccctggtccacatctcctacctagagatgggtcatgacatcactcgcctcttctactccaacattcagactgtcattaacaactggctcctcatcgagggtcatactattggcattggggactccattgctgattctaagacttaccaggacattcagaacactattaagaaggccaagcaggacgtaatagaggtcatcgagaaggcacacaacaatgagctggagcccaccccagggaacactctgcggcagacgtttgagaatcaggtgaaccgcattcttaacgatgcccgagacaagactggctcctctgctcagaaatccctgtctgaatacaacaacttcaagtctatggtcgtgtccggagctaaaggttccaagattaacatctcccaggtcattgctgtcgttggacagcagaacgtcgagggcaagcggattccatttggcttcaagcaccggactctgcctcacttcatcaaggatgactacgggcctgagagccgtggctttgtggagaactcctacctagccggcctcacacccactgagttctttttccacgccatggggggtcgtgaggggctcattgacacggctgtcaagactgctgagactggatacatccagcggcggctgatcaagtccatggagtcagtgatggtgaagtacgacgcgactgtgcggaactccatcaaccaggtggtgcagctgcgctacggcgaagacggcctggcaggcgagagcgttgagttccagaacctggctacgcttaagccttccaacaaggcttttgagaagaagttccgctttgattataccaatgagagggccctgcggcgcactctgcaggaggacctggtgaaggacgtgctgagcaacgcacacatccagaacgagttggagcgggaatttgagcggatgcgggaggatcgggaggtgctcagggtcatcttcccaactggagacagcaaggtcgtcctcccctgtaacctgctgcggatgatctggaatgctcagaaaatcttccacatcaacccacgccttccctccgacctgcaccccatcaaagtggtggagggagtcaaggaattgagcaagaagctggtgattgtgaatggggatgacccactaagtcgacaggcccaggaaaatgccacgctgctcttcaacatccacctgcggtccacgttgtgttcccgccgcatggcagaggagtttcggctcagtggggaggccttcgactggctgcttggggagattgagtccaagttcaaccaagccattgcgcatcccggggaaatggtgggggctctggctgcgcagtcccttggagaacctgccacccagatgaccttgaataccttccactatgctggtgtgtctgccaagaatgtgacgctgggtgtgccccgacttaaggagctcatcaacatttccaagaagccaaagactccttcgcttactgtcttcctgttgggccagtccgctcgagatgctgagagagccaaggatattctgtgccgtctggagcatacaacgttgaggaaggtgactgccaacacagccatctactatgaccccaacccccagagcacggtggtggcagaggatcaggaatgggtgaatgtctactatgaaatgcctgactttgatgtggcccgaatctccccctggctgttgcgggtggagctggatcggaagcacatgactgaccggaagctcaccatggagcagattgctgaaaagatcaatgctggttttggtgacgacttgaactgcatctttaatgatgacaatgcagagaagctggtgctccgtattcgcatcatgaacagcgatgagaacaagatgcaagaggaggaagaggtggtggacaagatggatgatgatgtcttcctgcgctgcatcgagtccaacatgctgacagatatgaccctgcagggcatcgagcagatcagcaaggtgtacatgcacttgccacagacagacaacaagaagaagatcatcatcacggaggatggggaattcaaggccctgcaggagtggatcctggagacggacggcgtgagcttgatgcgggtgctgagtgagaaggacgtggaccccgtacgcaccacgtccaatgacattgtggagatcttcacggtgctgggcattgaagccgtgcggaaggccctggagcgggagctgtaccacgtcatctcctttgatggctcctatgtcaattaccgacacttggctctcttgtgtgataccatgacctgtcgtggccacttgatggccatcacccgacacggagtcaaccgccaggacacaggaccactcatgaagtgttcctttgaggaaacggtggacgtgcttatggaagcagccgcacacggtgagagtgaccccatgaagggggtctctgagaatatcatgctgggccagctggctccggccggcactggctgctttgacctcctgcttgatgcagagaagtgcaagtatggcatggagatccccaccaatatccccggcctgggggctgctggacccaccggcatgttctttggttcagcacccagtcccatgggtggaatctctcctgccatgacaccttggaaccagggtgcaacccctgcctatggcgcctggtcccccagtgttgggagtggaatgaccccaggggcagccggcttctctcccagtgctgcgtcagatgccagcggcttcagcccaggttactcccctgcctggtctcccacaccgggctccccggggtccccaggtccctcaagcccctacatcccttcaccaggtggtgccatgtctcccagctactcgccaacgtcacctgcctacgagccccgctctcctgggggctacacaccccagagtccctcttattcccccacttcaccctcctactcccctacctctccatcctattctccaaccagtcccaactatagtcccacatcacccagctattcgccaacgtcacccagctactcaccgacctctcccagctactcacccacctctcccagctactcgcccacctctcccagctactcgcccacctctcccagctactcacccacttcccctagctactcgcccacttcccctagctactcgccaacgtctcccagctactcgccgacatctcccagctactcgccaacttcacccagctattctcccacttctcccagctactcacctacctctccaagctattcacccacctcccccagctactcacccacttccccaagttactcacccaccagcccgaactattctccaaccagtcccaattacaccccaacatcacccagctacagcccgacatcacccagctattcacctactagtcccaactacacacctaccagccctaactacagcccaacctctccaagctactctccaacatcacccagctattccccgacctcaccaagttactccccttccagcccacgatacacaccacagtctccaacctataccccaagctcacccagctacagccccagctcgcccagctacagcccaacctcacccaagtacaccccaaccagtccttcttacagtcccagctccccagagtataccccaacctctcccaagtactcacctaccagtcccaaatattcacccacctctcccaagtactcgcctaccagtcccacctattcacccaccaccccaaaatactccccaacatctcctacttattccccaacctctccagtctacaccccaacctctcccaagtactcacctactagccccacttactcgcccacttcccccaagtactcgcccaccagccccacctactcgcccacctcccccaaaggctcaacctactctcccacttcccctggttactcgcccaccagccccacctacagtctcacaagcccggctatcagcccggatgacagtgacgaggagaactgagggcacgtggggtgcggcagcgggctagggcccagggcagcttgcccgtgctgctgtgcagttcttgcctccctcacggggcgtcacccccagcccagctccgttgtacataaatgccttgtggcagagctcccggtgaacttctggatcccgtttctgatgcagactcttgtcttgttctccacttgtgctgttagaactcactggcccagtggtgttctcactcctaccccacccaccccctgcctgtccccaaattgaagatccttccttgcctgtggcttgatgcggggcgggtaaagggtattttaacttaggggtagttcctgctgtgagtggttacagctgatcctcgggaagaacaaagctaaagctgccttttgtctgttattttatttttttgaagtttaaataaagtttactaattttgaccaaaagt

SEQ ID NO: 311 - DNA, 532 bp, Homo sapiens
  ref <308>: DATABASE ACCESSION NUMBER: NCBI / NM_001016
  ref <309>: DATABASE ENTRY DATE: 2011-11-21
  ref <313>: RELEVANT RESIDUES IN SEQ ID NO: (1)..(532)
ctctttccctgccgccgccgagtcgcgcggaggcggaggcttgggtgcgttcaagattcaacttcacccgtaacccaccgccatggccgaggaaggcattgctgctggaggtgtaatggacgttaatactgctttacaagaggttctgaagactgccctcatccacgatggcctagcacgtggaattcgcgaagctgccaaagccttagacaagcgccaagcccatctttgtgtgcttgcatccaactgtgatgagcctatgtatgtcaagttggtggaggccctttgtgctgaacaccaaatcaacctaattaaggttgatgacaacaagaaactaggagaatgggtaggcctttgtaaaattgacagagaggggaaaccccgtaaagtggttggttgcagttgtgtagtagttaaggactatggcaaggagtctcaggccaaggatgtcattgaagagtatttcaaatgcaagaaatgaagaaataaatctttggctcacaaaaaaaaaaaaaaaaaaaaaaaaaaaaaa

SEQ ID NO: 312 - DNA, 2995 bp, Homo sapiens
  ref <308>: DATABASE ACCESSION NUMBER: NCBI / NM_002140
  ref <309>: DATABASE ENTRY DATE: 2011-11-26
  ref <313>: RELEVANT RESIDUES IN SEQ ID NO: (1)..(2995)
ccctagccgcccctccccccagctagtgagtgcgcgaacgagaaaggaggagggcgctccaggcgacagcactgcagacgccattatcctctgtttctctgctgcaccgacctcgacgtcttgcctgtgtcccacttgttcgcggcctataggctactgcagcactggggtgtcagttgttggtccgacccagaacgcttcagttctgctctgcaaggatatataataactgattggtgtgcccgtttaataaaagaatatggaaactgaacagccagaagaaaccttccctaacactgaaaccaatggtgaatttggtaaacgccctgcagaagatatggaagaggaacaagcatttaaaagatctagaaacactgatgagatggttgaattacgcattctgcttcagagcaagaatgctggggcagtgattggaaaaggaggcaagaatattaaggctctccgtacagactacaatgccagtgtttcagtcccagacagcagtggccccgagcgcatattgagtatcagtgctgatattgaaacaattggagaaattctgaagaaaatcatccctaccttggaagagggcctgcagttgccatcacccactgcaaccagccagctcccgctcgaatctgatgctgtggaatgcttaaattaccaacactataaaggaagtgactttgactgcgagttgaggctgttgattcatcagagtctagcaggaggaattattggggtcaaaggtgctaaaatcaaagaacttcgagagaacactcaaaccaccatcaagcttttccaggaatgctgtcctcattccactgacagagttgttcttattggaggaaaacccgatagggttgtagagtgcataaagatcatccttgatcttatatctgagtctcccatcaaaggacgtgcacagccttatgatcccaatttttacgatgaaacctatgattatggtggttttacaatgatgtttgatgaccgtcgcggacgcccagtgggatttcccatgcggggaagaggtggttttgacagaatgcctcctggtcggggtgggcgtcccatgcctccatctagaagagattatgatgatatgagccctcgtcgaggaccacctccccctcctcccggacgaggcggccggggtggtagcagagctcggaatcttcctcttcctccaccaccaccacctagagggggagacctcatggcctatgacagaagagggagacctggagaccgttacgacggcatggttggtttcagtgctgatgaaacttgggactctgcaatagatacatggagcccatcagaatggcagatggcttatgaaccacagggtggctccggatatgattattcctatgcagggggtcgtggctcatatggtgatcttggtggacctattattactacacaagtaactattcccaaagatttggctggatctattattggcaaaggtggtcagcggattaaacaaatccgtcatgagtcgggagcttcgatcaaaattgatgagcctttagaaggatccgaagatcggatcattaccattacaggaacacaggaccagatacagaatgcacagtatttgctgcagaacagtgtgaagcagtatgcagatgttgaaggattctaatgcaagatattttttcttttttatagtgtgaagcagtattctggaaagtttttctaagactagtgaagaactgaaggagtcctgcatctttttttttttatctgcttctgtttaaaaagccaacattcctctgcttcataggtgttctgcatttgaggtgtagtgaaatctttgctgttcaccagatgtaatgttttagttccttacaaacagggttgggggggggaagggcgtgcaaaaactaacattgaaattttgaaacagcagcagagtgagtggattttatttttcgttattgttggtggtttaaaaaattccccccatgtaattattgtgaacaccttgctttgtggtcactgtaacatttggggggtgggacagggaggaaaagtaacaatagtccacatgtccctggcatctgttcagagcagtgtgcagaatgtaatgctcttttgtaagaaacgttttatgatttttaaaataaatttagtgaacctatttttggtggtcattttttttttaagacagtcattttaaaatggtggctgaatttcccaacccacccccaaactaaacactaagtttaattttcagctcctctgttggacatataagtgcatctcttgttggacataggcaaaataacttggcaaacttagttctggtgatttcttgatggtttggaagtctattgctgggaagaaattccatcatacatattcatgcttataataagctggggattttttgtttgtttttgcaaatgcttgcccctacttttcaacaattttctatgttagttgtgaagaactaaggtggggagcagtactacaagttgagtaatggtatgagtatataccagaattctgattggcagcaagttttattaatcagaataacacttggttatggaagtgactaatgctgaaaaaattgattatttttattagataatttctcacctatagacttaaactgtcaatttgctctagtgtcttattagttaaactttgtaaaatatatatatacttgtttttccattgtatgcaaattgaaagaaaaagatgtaccatttctctgttgtatgttggattatgtaggaaatgtttgtgtacaattcaaaaaaaaaaaagatgaaaaaagttcctgtggatgttttgtgtagtatcttggcatttgtattgatagttaaaattcacttccaaataaataaaacacccatgatgctagatttgatgtgtgcccgatttgaacaagggttgattgacacctgtaaaatttgttgaaacgttcctcttaaaaggaaatatagtaatcttatgtaaaaaaaaaaaaaaaaaa

SEQ ID NO: 313 - DNA, 2110 bp, Homo sapiens
  ref <308>: DATABASE ACCESSION NUMBER: NCBI / NM_002138
  ref <309>: DATABASE ENTRY DATE: 2011-12-17
  ref <313>: RELEVANT RESIDUES IN SEQ ID NO: (1)..(2110)
cttccgtcggccattttaggtggtccgcggcggcgccattaaagcgaggaggaggcgagagcggccgccgctggtgcttattcttttttagtgcagcgggagagagcgggagtgtgcgccgcgcgagagtgggaggcgaagggggcaggccagggagaggcgcaggagcctttgcagccacgcgcgcgccttccctgtcttgtgtgcttcgcgaggtagagcgggcgcgcggcagcggcggggattactttgctgctagtttcggttcgcggcagcggcgggtgtagtctcggcggcagcggcggagacactagcactatgtcggaggagcagttcggcggggacggggcggcggcagcggcaacggcggcggtaggcggctcggcgggcgagcaggagggagccatggtggcggcgacacagggggcagcggcggcggcgggaagcggagccgggaccgggggcggaaccgcgtctggaggcaccgaagggggcagcgccgagtcggagggggcgaagattgacgccagtaagaacgaggaggatgaaggccattcaaactcctccccacgacactctgaagcagcgacggcacagcgggaagaatggaaaatgtttataggaggccttagctgggacactacaaagaaagatctgaaggactacttttccaaatttggtgaagttgtagactgcactctgaagttagatcctatcacagggcgatcaaggggttttggctttgtgctatttaaagaatcggagagtgtagataaggtcatggatcaaaaagaacataaattgaatgggaaggtgattgatcctaaaagggccaaagccatgaaaacaaaagagccggttaaaaaaatttttgttggtggcctttctccagatacacctgaagagaaaataagggagtactttggtggttttggtgaggtggaatccatagagctccccatggacaacaagaccaataagaggcgtgggttctgctttattacctttaaggaagaagaaccagtgaagaagataatggaaaagaaataccacaatgttggtcttagtaaatgtgaaataaaagtagccatgtcgaaggaacaatatcagcaacagcaacagtggggatctagaggaggatttgcaggaagagctcgtggaagaggtggtgaccagcagagtggttatgggaaggtatccaggcgaggtggtcatcaaaatagctacaaaccatactaaattattccatttgcaacttatccccaacaggtggtgaagcagtattttccaatttgaagattcatttgaaggtggctcctgccacctgctaatagcagttcaaactaaattttttgtatcaagtccctgaatggaagtatgacgttgggtccctctgaagtttaattctgagttctcattaaaagaaatttgctttcattgttttatttcttaattgctatgcttcagaatcaatttgtgttttatgccctttcccccagtattgtagagcaagtcttgtgttaaaagcccagtgtgacagtgtcatgatgtagtagtgtcttactggttttttaataaatccttttgtataaaaatgtattggctcttttatcatcagaataggaaaaattgtcatggattcaagttattaaaagcataagtttggaagacaggcttgccgaaattgaggacatgattaaaattgcagtgaagtttgaaatgtttttagcaaaatctaatttttgccataatgtgtcctccctgtccaaattgggaatgacttaatgtcaatttgtttgttggttgttttaataatacttccttatgtagccattaagatttatatgaatattttcccaaatgcccagtttttgcttaatatgtattgtgctttttagaacaaatctggataaatgtgcaaaagtacccctttgcacagatagttaatgttttatgcttccattaaataaaaaggacttaaaatctgttaattataatagaaatgcggctagttcagagagatttttagagctgtggtggacttcatagatgaattcaagtgttgagggaggattaaagaaatatataccgtgtttatgtgtgtgtgctt

SEQ ID NO: 314 - DNA, 1696 bp, Homo sapiens
  ref <308>: DATABASE ACCESSION NUMBER: NCBI / NM_004499
  ref <309>: DATABASE ENTRY DATE: 2011-11-20
  ref <313>: RELEVANT RESIDUES IN SEQ ID NO: (1)..(1696)
aaagggcgccacgagtcggcattgtcaggcggcggcaccgcgcgggacggagcttggctgttggtcggtgggttcccgtgcggcggcggccaaggaggaggagacacagttggagcagctccgtgggctgactggggcgaggcctcagcagcgcgagcttgagtgcggccgagcctgcggcgccttcccctgcgggtggggacgagcgggccccgcggcgtcatcggcggcgaggagccgccgcgcctcggcctagcatgtcggaagcgggcgaggagcagcccatggagacgacgggcgccaccgagaacggacatgaggccgtccccgaaggcgagtcgccggccggggctggcacgggcgccgcggcgggggctggaggcgcgaccgcggcgcccccgagcgggaatcagaacggcgccgagggcgaccagatcaacgccagcaagaacgaggaggacgcgggaaaaatgttcgttggtggcctgagctgggatactagcaaaaaagatttaaaagactattttactaaatttggagaggtcgttgactgtacaataaaaatggatcccaacactggacggtcaagagggtttgggtttatcctgttcaaagatgcagccagtgtggagaaggtcctagaccagaaggagcacaggctggatggccgtgtcattgaccctaaaaaggccatggctatgaagaaggacccggtgaagaaaatcttcgttgggggtctgaatcctgaagccactgaggaaaagatcagggagtactttggcgagtttggggagattgaggccattgaattgccaatggatccaaagttgaacaaaagacgaggttttgtgtttatcacctttaaagaagaagaacccgtgaagaaggttctggagaaaaagttccatactgtcagtggaagcaagtgtgagatcaaggtggcccagcccaaagaagtctatcagcagcagcagtatggctctgggggccgtggaaaccgcaaccgagggaaccgaggcagcggaggtggtggtggaggtggaggtcagggtagtacaaactacggcaagagccagcgacgtggtggccatcagaataactacaagccatactgaggcggcagcaggagcgaccaactgatcgcacacatgctttgtttggatatggagtgaacacaattatgtaccaaatttaacttggcaaactttctattgcctgtcccatgtgcatcttatttaaaatttcccccatggaaatcactctcctgttgactatttccagagctctaggtgtttaggcagcgtgtggtgtctgagaggccatagcgccatcatgggctgatttttattaccaggtcccccagaagcaggtgggaggctctgcttcctgctgccgctctgcagcctggacctgtggaccctggttgtaaagagtaaattgtatcttaggaaaccagtgtcacctttttttcaccttttaattttatattatttgcgtcatacatttcctgtaacggaagtgttaattttactgtactttttggtaccttttgggaatctaatgtattgtaaggtattttacacgtgtcctgattttgccacaacctggatattgaagctatccaagcttttgaaataaaatttaaaaacccccaagcctgggtgagtgtgggataaaaaaaaaaaaaaaaaaaaaa

SEQ ID NO: 315 - DNA, 660 bp, Homo sapiens
  ref <308>: DATABASE ACCESSION NUMBER: NCBI / NM_001014
  ref <309>: DATABASE ENTRY DATE: 2011-11-05
  ref <313>: RELEVANT RESIDUES IN SEQ ID NO: (1)..(660)
ggcggggggcgggtccacgccagcccggaagagacgcagcaccgcgcatgctccttcctttccagccccggtaccggaccctgcagccgcagagatgttgatgcctaagaagaaccggattgccatttatgaactcctttttaaggagggagtcatggtggccaagaaggatgtccacatgcctaagcacccggagctggcagacaagaatgtgcccaaccttcatgtcatgaaggccatgcagtctctcaagtcccgaggctacgtgaaggaacagtttgcctggagacatttctactggtaccttaccaatgagggtatccagtatctccgtgattaccttcatctgcccccggagattgtgcctgccaccctacgccgtagccgtccagagactggcaggcctcggcctaaaggtctggagggtgagcgacctgcgagactcacaagaggggaagctgacagagatacctacagacggagtgctgtgccacctggtgccgacaagaaagccgaggctggggctgggtcagcaaccgaattccagtttagaggcggatttggtcgtggacgtggtcagccacctcagtaaaattggagaggattcttttgcattgaataaacttacagccaaaaaaccttaaaaaaaaaaaaaaaaaa

SEQ ID NO: 316 - DNA, 2564 bp, Homo sapiens
  ref <308>: DATABASE ACCESSION NUMBER: NCBI / NM_002383
  ref <309>: DATABASE ENTRY DATE: 2011-12-25
  ref <313>: RELEVANT RESIDUES IN SEQ ID NO: (1)..(2564)
ttcctccctcccgccggccggggtgcgcgggcggcggggcggcccgcgggccatgcgttcggcgcggcccagcccggccggccgggggcggcgccccgagcccgggccccgcgcggcccgcgcccccggcccccgctgagccccgggggccccgctgcggccgaggccatgttcccggtgtttccttgcacgctgctggccccccccttccccgtgctgggcctggactcccggggggtgggcggcctcatgaactccttcccgccacctcagggtcacgcccagaaccccctgcaggtcggggctgagctccagtcccgcttctttgcctcccagggctgcgcccagagtccattccaggccgcgccggcgcccccgcccacgccccaggccccggcggccgagcccctccaggtggacttgctcccggtgctcgccgccgcccaggagtccgccgcggctgctgcggccgctgccgccgctgctgccgccgtcgctgccgcgcccccggcccctgccgccgcctctacggtggacacagcggccctgaagcagcctccggcgccccctccgccacccccgccagtgtcggcgcccgcggccgaggccgcgccccccgcctccgccgccactatcgccgcggcggcggccaccgccgtcgtagccccaacctcgacggtcgccgtggccccggtcgcgtctgccttggagaagaagacaaagagcaaggggccctacatctgcgctctgtgcgccaaggagttcaagaacggctacaatctccggaggcacgaagccatccacacgggagccaaggccggccgggtcccctcgggtgctatgaagatgccgaccatggtgcccctgagcctcctgagcgtgccccagctgagcggagccggcgggggagggggagaggcgggtgccggcggcggcgctgccgcagtggccgccggtggcgtggtgaccacgaccgcctcggggaagcgcatccggaagaaccatgcctgcgagatgtgtggcaaggccttccgcgacgtctaccacctgaaccgacacaagctgtcgcactcggacgagaagccctaccagtgcccggtgtgccagcagcgcttcaagcgcaaggaccgcatgagctaccacgtgcgctcacatgacggcgctgtgcacaagccctacaactgctcccactgtggcaagagcttctcccggccggatcacctcaacagtcacgtcagacaagtgcactcaacagaacggcccttcaaatgtgagaaatgtgaggcagctttcgccacgaaggatcggctgcgggcgcacacagtacgacacgaggagaaagtgccatgtcacgtgtgtggcaagatgctgagctcggcttatatttcggaccacatgaaggtgcacagccagggtcctcaccatgtctgtgagctctgcaacaaaggtactggtgaggtttgtccaatggcggcggcagcggcagcggcggcagcggcagcagcggcagcagtagcagcccctcccacagctgtgggctccctctcgggggcggagggggtgcctgtgagctctcagccacttccctcccaaccctggtgagctccaagttggttgcgggggagaggggagaatggagtagagtcccttggtacaagctcctctcccccctcttttcccaccaactcctatttccctaccaaccaaggagcctccagaaggaaaggaggaagaaatgttttcttaggggaattcgctaggttttaacgatttgtttctcctgctcctcttctgtcagacctgaccccacacaaacctgtcccctcggttgtgttgaagtcccctggacagtgggcaggggtggcagaggacacgagcagccactgcccgtaccccctctcctctctgtaagcccatgccctgtcttcccagggacttgtgagcctcttccctcgacggtcctcttctctccttccagtcctctccccctgctgtctgcagcccctccccggggagttggtgctttcttttccttttttttttttttccagggggagggaggagaggaaggagggggatcagagctgtcccaaagagggaaagcggtgaggtttgaggaggggcagaagcagggccggcaaaggttgtaccttcataaggtggtatggggggttggggtcaggccctgaacatcgtcctacttgagaatctgtcaggggaaaaagtcaaggggagcaggaggaagagccaggagggccagaggcagagaagagatggagtcttaggggccagggtgagcgaggggtccagggcctagaggtgcttcctgggggcgggggaatgcagccagtgtccccctcccctcttccaccccagctccagccctggtcttgtcttttcatccctcttccccacgacagaagaagttgtggccctggccatgtcatcgtgttcctgtgtcccctgcatgtaccccaccctccaccccttccttttgcgcggaccccattacaataaattttaaataaaatcctgtttctggctctggattgaaaaaaaaaaaa

SEQ ID NO: 317 - DNA, 2379 bp, Homo sapiens
  ref <308>: DATABASE ACCESSION NUMBER: NCBI / NM_002467
  ref <309>: DATABASE ENTRY DATE: 2012-01-01
  ref <313>: RELEVANT RESIDUES IN SEQ ID NO: (1)..(2379)
gacccccgagctgtgctgctcgcggccgccaccgccgggccccggccgtccctggctcccctcctgcctcgagaagggcagggcttctcagaggcttggcgggaaaaagaacggagggagggatcgcgctgagtataaaagccggttttcggggctttatctaactcgctgtagtaattccagcgagaggcagagggagcgagcgggcggccggctagggtggaagagccgggcgagcagagctgcgctgcgggcgtcctgggaagggagatccggagcgaatagggggcttcgcctctggcccagccctcccgctgatcccccagccagcggtccgcaacccttgccgcatccacgaaactttgcccatagcagcgggcgggcactttgcactggaacttacaacacccgagcaaggacgcgactctcccgacgcggggaggctattctgcccatttggggacacttccccgccgctgccaggacccgcttctctgaaaggctctccttgcagctgcttagacgctggatttttttcgggtagtggaaaaccagcagcctcccgcgacgatgcccctcaacgttagcttcaccaacaggaactatgacctcgactacgactcggtgcagccgtatttctactgcgacgaggaggagaacttctaccagcagcagcagcagagcgagctgcagcccccggcgcccagcgaggatatctggaagaaattcgagctgctgcccaccccgcccctgtcccctagccgccgctccgggctctgctcgccctcctacgttgcggtcacacccttctcccttcggggagacaacgacggcggtggcgggagcttctccacggccgaccagctggagatggtgaccgagctgctgggaggagacatggtgaaccagagtttcatctgcgacccggacgacgagaccttcatcaaaaacatcatcatccaggactgtatgtggagcggcttctcggccgccgccaagctcgtctcagagaagctggcctcctaccaggctgcgcgcaaagacagcggcagcccgaaccccgcccgcggccacagcgtctgctccacctccagcttgtacctgcaggatctgagcgccgccgcctcagagtgcatcgacccctcggtggtcttcccctaccctctcaacgacagcagctcgcccaagtcctgcgcctcgcaagactccagcgccttctctccgtcctcggattctctgctctcctcgacggagtcctccccgcagggcagccccgagcccctggtgctccatgaggagacaccgcccaccaccagcagcgactctgaggaggaacaagaagatgaggaagaaatcgatgttgtttctgtggaaaagaggcaggctcctggcaaaaggtcagagtctggatcaccttctgctggaggccacagcaaacctcctcacagcccactggtcctcaagaggtgccacgtctccacacatcagcacaactacgcagcgcctccctccactcggaaggactatcctgctgccaagagggtcaagttggacagtgtcagagtcctgagacagatcagcaacaaccgaaaatgcaccagccccaggtcctcggacaccgaggagaatgtcaagaggcgaacacacaacgtcttggagcgccagaggaggaacgagctaaaacggagcttttttgccctgcgtgaccagatcccggagttggaaaacaatgaaaaggcccccaaggtagttatccttaaaaaagccacagcatacatcctgtccgtccaagcagaggagcaaaagctcatttctgaagaggacttgttgcggaaacgacgagaacagttgaaacacaaacttgaacagctacggaactcttgtgcgtaaggaaaagtaaggaaaacgattccttctaacagaaatgtcctgagcaatcacctatgaacttgtttcaaatgcatgatcaaatgcaacctcacaaccttggctgagtcttgagactgaaagatttagccataatgtaaactgcctcaaattggactttgggcataaaagaacttttttatgcttaccatcttttttttttctttaacagatttgtatttaagaattgtttttaaaaaattttaagatttacacaatgtttctctgtaaatattgccattaaatgtaaataactttaataaaacgtttatagcagttacacagaatttcaatcctagtatatagtacctagtattataggtactataaaccctaattttttttatttaagtacattttgctttttaaagttgatttttttctattgtttttagaaaaaataaaataactggcaaatatatcattgagccaaatcttaaaaaaaaaaaaaaa

SEQ ID NO: 318 - DNA, 1171 bp, Homo sapiens
  ref <308>: DATABASE ACCESSION NUMBER: NCBI / NM_001436
  ref <309>: DATABASE ENTRY DATE: 2011-11-27
  ref <313>: RELEVANT RESIDUES IN SEQ ID NO: (1)..(1171)
gcgtcacgcagcgcacgtcgccgcgcgcctgcgctcttttccacgtgcgaaagccccggactcgtggagttgtgaacgccgcggactccggagccgcacaaaccagggctcgccatgaagccaggattcagtccccgtgggggtggctttggcggccgagggggctttggtgaccgtggtggtcgtggaggccgagggggctttggcgggggccgaggtcgaggcggaggctttagaggtcgtggacgaggaggaggtggaggcggcggcggcggtggaggaggaggaagaggtggtggaggcttccattctggtggcaaccggggtcgtggtcggggaggaaaaagaggaaaccagtcggggaagaatgtgatggtggagccgcatcggcatgagggtgtcttcatttgtcgaggaaaggaagatgcactggtcaccaagaacctggtccctggggaatcagtttatggagagaagagagtctcgatttcggaaggagatgacaaaattgagtaccgagcctggaaccccttccgctccaagctagcagcagcaatcctgggtggtgtggaccagatccacatcaaaccgggggctaaggttctctacctcggggctgcctcgggcaccacggtctcccatgtctctgacatcgttggtccggatggtctagtctatgcagtcgagttctcccaccgctctggccgtgacctcattaacttggccaagaagaggaccaacatcattcctgtgatcgaggatgctcgacacccacacaaataccgcatgctcatcgcaatggtggatgtgatctttgctgatgtggcccagccagaccagacccggattgtggccctgaatgcccacaccttcctgcgtaatggaggacactttgtgatttccattaaggccaactgcattgactccacagcctcagccgaggccgtgtttgcctccgaagtgaaaaagatgcaacaggagaacatgaagccgcaggagcagttgacccttgagccatatgaaagagaccatgccgtggtcgtgggagtgtacaggccaccccccaaggtgaagaactgaagttcagcgctgtcaggattgcgagagatgtgtgttgatactgttgcacgtgtgtttttctattaaaagactcatccgtctcccaaaaaaa

SEQ ID NO: 319 - DNA, 890 bp, Homo sapiens
  ref <308>: DATABASE ACCESSION NUMBER: NCBI / NM_004069
  ref <309>: DATABASE ENTRY DATE: 2011-11-19
  ref <313>: RELEVANT RESIDUES IN SEQ ID NO: (1)..(890)
atcttcacccaggctggcccctttggtgaaactacaactcccaggggtctgtgcgcgagaaggcaggcgggtttttctaccggaagtccgctctagctctgggccctacaactgcaccctgagccggagctgcccagtcgccgcgggaccggggccgctggggtctggacgggggtcgccatgatccgctttatcctcatccagaaccgggcaggcaagacgcgcctggccaagtggtacatgcagtttgatgatgatgagaaacagaagctgatcgaggaggtgcatgccgtggtcaccgtccgagacgccaaacacaccaactttgtggagttccggaactttaagatcatttaccgccgctatgctggcctctacttctgcatctgtgtggatgtcaatgacaacaacctggcttacctggaggccattcacaacttcgtggaggtcttaaacgaatatttccacaatgtctgtgaactggacctggtgttcaacttctacaaggtttacacggtcgtggacgagatgttcctggctggcgaaatccgagagaccagccagacgaaggtgctgaaacagctgctgatgctacagtccctggagtgagggcaggcgagccccaccccggccccggcccctcctggactcgcctgctcgcttccccttcccaggcccgtggccaacccagcagtccttccctcagctgcctaggaggaagggacccagctgggtctgggccacaagggaggagactgcaccccactgcctctgggccctggctgtgggcagaggccaccgtgtgtgtcccgagtaaccgtgccgttgtcgtgtgatgccataagcgtctgtgcgtggagtccccaataaacctgtggtcctgcctggcc

SEQ ID NO: 320 - DNA, 2004 bp, Homo sapiens
  ref <308>: DATABASE ACCESSION NUMBER: NCBI / NM_001614
  ref <309>: DATABASE ENTRY DATE: 2011-12-04
  ref <313>: RELEVANT RESIDUES IN SEQ ID NO: (1)..(2004)
gcgcgccgccgggccgcgcgggcgcgccgcttccgcttaaataacggcgggggaggccgcggtcggtctcagtcgccgctgccagctctcgcactctgttcttccgccgctccgccgtcgcgtttctctgccggtcgcaatggaagaagagatcgccgcgctggtcattgacaatggctccggcatgtgcaaagctggttttgctggggacgacgctccccgagccgtgtttccttccatcgtcgggcgccccagacaccagggcgtcatggtgggcatgggccagaaggactcctacgtgggcgacgaggcccagagcaagcgtggcatcctgaccctgaagtaccccattgagcatggcatcgtcaccaactgggacgacatggagaagatctggcaccacaccttctacaacgagctgcgcgtggccccggaggagcacccagtgctgctgaccgaggcccccctgaaccccaaggccaacagagagaagatgactcagattatgtttgagaccttcaacaccccggccatgtacgtggccatccaggccgtgctgtccctctacgcctctgggcgcaccactggcattgtcatggactctggagacggggtcacccacacggtgcccatctacgagggctacgccctcccccacgccatcctgcgtctggacctggctggccgggacctgaccgactacctcatgaagatcctcactgagcgaggctacagcttcaccaccacggccgagcgggaaatcgtgcgcgacatcaaggagaagctgtgctacgtcgccctggacttcgagcaggagatggccaccgccgcatcctcctcttctctggagaagagctacgagctgcccgatggccaggtcatcaccattggcaatgagcggttccggtgtccggaggcgctgttccagccttccttcctgggtatggaatcttgcggcatccacgagaccaccttcaactccatcatgaagtgtgacgtggacatccgcaaagacctgtacgccaacacggtgctgtcgggcggcaccaccatgtacccgggcattgccgacaggatgcagaaggagatcaccgccctggcgcccagcaccatgaagatcaagatcatcgcacccccagagcgcaagtactcggtgtggatcggtggctccatcctggcctcactgtccaccttccagcagatgtggattagcaagcaggagtacgacgagtcgggcccctccatcgtccaccgcaaatgcttctaaacggactcagcagatgcgtagcatttgctgcatgggttaattgagaatagaaatttgcccctggcaaatgcacacacctcatgctagcctcacgaaactggaataagccttcgaaaagaaattgtccttgaagcttgtatctgatatcagcactggattgtagaacttgttgctgattttgaccttgtattgaagttaactgttccccttggtatttgtttaataccctgtacatatctttgagttcaacctttagtacgtgtggcttggtcacttcgtggctaaggtaagaacgtgcttgtggaagacaagtctgtggcttggtgagtctgtgtggccagcagcctctgatctgtgcagggtattaacgtgtcagggctgagtgttctgggatttctctagaggctggcaagaaccagttgttttgtcttgcgggtctgtcagggttggaaagtccaagccgtaggacccagtttcctttcttagctgatgtctttggccagaacaccgtgggctgttacttgctttgagttggaagcggtttgcatttacgcctgtaaatgtattcattcttaatttatgtaaggttttttttgtacgcaattctcgattctttgaagagatgacaacaaattttggttttctactgttatgtgagaacattaggccccagcaacacgtcattgtgtaaggaaaaataaaagtgctgccgtaaccaaaaaaaaaaaaaaaaaaaa

SEQ ID NO: 321 - DNA, 2583 bp, Homo sapiens
  ref <308>: DATABASE ACCESSION NUMBER: NCBI / NM_002355
  ref <309>: DATABASE ENTRY DATE: 2011-12-04
  ref <313>: RELEVANT RESIDUES IN SEQ ID NO: (1)..(2583)
atcagggagcccgggaaggggaaaggggcgaaatggttctatggtcacatgccgcggggtctggtgggaggagcggttgcccagcggcctcttggcgcttcctgtttccggttcccagagtggggcacagcgaggcgctagggggaacgctggcctctgaaactagctctgggaccggggtctgcggccggcccctagctggccccgtctcccatccccagaagggtattcactggggattctgagctttggctactccagtttcccacgacacgatgttccctttctacagctgctggaggactggactgctactactactcctggctgtggcagtgagagaatcctggcagacagaagaaaaaacttgcgacttggtaggagaaaagggtaaagagtcagagaaagagttggctctagtgaagaggctgaaaccactgtttaataaaagctttgagagcactgtgggccagggttcagacacatacatctacatcttcagggtgtgccgggaagctggcaaccacacttctggggcaggcctggtgcaaatcaacaaaagtaatgggaaggagacagtggtagggagactcaacgagactcacatcttcaacggaagtaattggatcatgctgatctataaagggggtgatgaatatgacaaccactgtggcaaggagcagcgtcgtgcagtggtgatgatctcctgcaatcgacacaccctagcggacaattttaaccctgtgtctgaggagcgtggcaaagtccaagattgtttctacctctttgagatggatagcagcctggcctgttcaccagagatctcccacctcagtgtgggttccatcttacttgtcacgtttgcatcactggttgctgtttatgttgttggggggttcctataccagcgactggtagtgggagccaaaggaatggagcagtttccccacttagccttctggcaggatcttggcaacctggtagcagatggctgtgactttgtctgccgttctaaacctcgaaatgtgcctgcagcatatcgtggtgtgggggatgaccagctgggggaggagtcagaagaaagggatgaccatttattaccaatgtagattgcactttatatgtccagcctcttcctcagtcccccaaaccaaagctacacagccagatttctcaagcagtctcaactccagtccctcatctcacccttactattgctcttgctttccagtttgcttttgatttgcatcttctcactagtaaaactgccttccctttgttccttattttctgttttttctctagagaggtacagttgtaagtcagagttaatataatagggcctgtgaaaacagaggcttttgcattgtctcttgacatcagaagttacaataggcatatgggcaaaatggtgtagcaggctcactggccgtttgttttttaaacacattttcacaagtttttgagacactggatttctttaattaaaaaaaaaatgccaagaaacattatttatacagggttgattgctttcatgttgttattctgtaccctatagtagcctccatgagaatctggtatttcttgctgcttggaactactttgcagtgattacttggttgcagtccaagtactctcgtttagtctgagcctggagatgttctagacttgcttctcccacctctgagattaggacaggaaaaatgtgaaatttcccaattacaggattatacggtaccatcacatcatttgtggaaattggggtgactgtatagctgggattgggctaaggactgtggtcttatctgtccacatacagccaaaatgcctatccagaaatccagttcgttggaaaggaaaattggtactcctgtgccacaggggttccagaaaagggaagtcactttaccttgcggtggtgggatcctgatgtctttcatccatttgtagtaaaagctggtaaagcttttcttactcctggttccctaccagtatttctaaacatgtcgcactttctccacaggcatgtggttttgacctttttttcaatcttctagaaagggaacggaagcagaagtgggacatcgagggctctgctgtcctctgcgctgggtgtggaatgctgctgcacctgtcccttctgctggctcagggaagtgtcttcttgcccacatttctgtggggaaaggtttttaatcctctgatgcttccatcttcctgtttaggccatgtgcccagaaacctggactgatctttctttaatagtgaacccctgggccactgaagagtaacatggctccactggacacaaaagagggatggaatcaacaggcagggggccttttataagccttaggaaaagaaaatgaaactatttcatctttggacttttcaatactattggagtgatttttttctttctaaacagggaaaataatgttacaaaagcatcttttttgttatttgtttgcatccctcccccacaccctggtgttttaaaatgaagaaaaaaaaccatcaccttttgtacaaaaactcttaatgattaaaaaacaaacaaaacataaaaaaaaaaaaaaaaaa

SEQ ID NO: 322 - DNA, 767 bp, Homo sapiens
  ref <308>: DATABASE ACCESSION NUMBER: NCBI / NM_004597
  ref <309>: DATABASE ENTRY DATE: 2011-11-27
  ref <313>: RELEVANT RESIDUES IN SEQ ID NO: (1)..(767)
gtaccattcttcaagaaacggtttgaatcagactgcctttccttttgtcttcattgtcataaacatctgcccccgtgtggttctgactggccgcgaacccctacccgaagcttttattccatcattgtgcaccgttggtggggaatgctgtggcaacaggccacgcctccacttactggttggctttgcgcaggcgccaacggaagtgggtcgcaggaagaggaagtcccgcctctctctcctcaggcagcagcaacgcggaggaaacgggagtgaacggagagcgtagtgaccatcatgagcctcctcaacaagcccaagagtgagatgaccccagaggagctgcagaagcgagaggaggaggaatttaacaccggtccactctctgtgctcacacagtcagtcaagaacaatacccaagtgctcatcaactgccgcaacaataagaaactcctgggccgcgtgaaggccttcgataggcactgcaacatggtgctggagaacgtgaaggagatgtggactgaggtacccaagagtggcaagggcaagaagaagtccaagccagtcaacaaagaccgctacatctccaagatgttcctgcgcggggactcagtcatcgtggtcctgcggaacccgctcatcgccggcaagtaggggccgcctgtctgttgacagaactcactcctctgtcctatgaagaccgctgccattggtgttgagaataataaagctctgtgtttttttctagtggtaaaaaaaaaaaaaaa

SEQ ID NO: 323 - DNA, 1739 bp, Homo sapiens
  ref <308>: DATABASE ACCESSION NUMBER: NCBI / NM_002308
  ref <309>: DATABASE ENTRY DATE: 2011-12-25
  ref <313>: RELEVANT RESIDUES IN SEQ ID NO: (1)..(1739)
tccccattgaataacagccaagttgctttggtttctatttctttgttaagtcgttccctctacaaaggacttcctagtgggtgtgaaaggcagcggtggccacagaggcggcggagagatggccttcagcggttcccaggctccctacctgagtccagctgtccccttttctgggactattcaaggaggtctccaggacggacttcagatcactgtcaatgggaccgttctcagctccagtggaaccaggtttgctgtgaactttcagactggcttcagtggaaatgacattgccttccacttcaaccctcggtttgaagatggagggtacgtggtgtgcaacacgaggcagaacggaagctgggggcccgaggagaggaagacacacatgcctttccagaaggggatgccctttgacctctgcttcctggtgcagagctcagatttcaaggtgatggtgaacgggatcctcttcgtgcagtacttccaccgcgtgcccttccaccgtgtggacaccatctccgtcaatggctctgtgcagctgtcctacatcagcttccagcctcccggcgtgtggcctgccaacccggctcccattacccagacagtcatccacacagtgcagagcgcccctggacagatgttctctactcccgccatcccacctatgatgtacccccaccccgcctatccgatgcctttcatcaccaccattctgggagggctgtacccatccaagtccatcctcctgtcaggcactgtcctgcccagtgctcagaggttccacatcaacctgtgctctgggaaccacatcgccttccacctgaacccccgttttgatgagaatgctgtggtccgcaacacccagatcgacaactcctgggggtctgaggagcgaagtctgccccgaaaaatgcccttcgtccgtggccagagcttctcagtgtggatcttgtgtgaagctcactgcctcaaggtggccgtggatggtcagcacctgtttgaatactaccatcgcctgaggaacctgcccaccatcaacagactggaagtggggggcgacatccagctgacccatgtgcagacataggcggcttcctggccctggggccgggggctggggtgtggggcagtctgggtcctctcatcatccccacttcccaggcccagcctttccaaccctgcctgggatctgggctttaatgcagaggccatgtccttgtctggtcctgcttctggctacagccaccctggaacggagaaggcagctgacggggattgccttcctcagccgcagcagcacctggggctccagctgctggaatcctaccatcccaggaggcaggcacagccagggagaggggaggagtgggcagtgaagatgaagccccatgctcagtcccctcccatcccccacgcagctccaccccagtcccaagccaccagctgtctgctcctggtgggaggtggcctcctcagcccctcctctctgacctttaacctcactctcaccttgcaccgtgcaccaacccttcacccctcctggaaagcaggcctgatggcttcccactggcctccaccacctgaccagagtgttctcttcagaggactggctcctttcccagtgtccttaaaataaagaaatgaaaatgcttgttggcacattcaaaaaaaaaaaaaaaaaaaaaaaaaaaaaaaaaaaaaaaaaaaaaaaaaaaaaaaaaaaaaaaaaaaaaaaa

SEQ ID NO: 324 - DNA, 2923 bp, Homo sapiens
  ref <308>: DATABASE ACCESSION NUMBER: NCBI / NM_000398
  ref <309>: DATABASE ENTRY DATE: 2011-12-04
  ref <313>: RELEVANT RESIDUES IN SEQ ID NO: (1)..(2923)
ctgctccggagtgacgcgggcccgggcgcgacggtctcggcggcggcggcggcggcgacagagcgagcgcggcgcggggccaccatgggggcccagctcagcacgttgggccatatggtgctcttcccagtctggttcctgtacagtctgctcatgaagctgttccagcgctccacgccagccatcaccctcgagagcccggacatcaagtacccgctgcggctcatcgaccgggagatcatcagccatgacacccggcgcttccgctttgccctgccgtcaccccagcacatcctgggcctccctgtcggccagcacatctacctctcggctcgaattgatggaaacctggtcgtccggccctatacacccatctccagcgatgatgacaagggcttcgtggacctggtcatcaaggtttacttcaaggacacccatcccaagtttcccgctggagggaagatgtctcagtacctggagagcatgcagattggagacaccattgagttccggggccccagtgggctgctggtctaccagggcaaagggaagttcgccatccgacctgacaaaaagtccaaccctatcatcaggacagtgaagtctgtgggcatgatcgcgggagggacaggcatcaccccgatgctgcaggtgatccgcgccatcatgaaggaccctgatgaccacactgtgtgccacctgctctttgccaaccagaccgagaaggacatcctgctgcgacctgagctggaggaactcaggaacaaacattctgcacgcttcaagctctggtacacgctggacagagcccctgaagcctgggactacggccagggcttcgtgaatgaggagatgatccgggaccaccttccacccccagaggaggagccgctggtgctgatgtgtggccccccacccatgatccagtacgcctgccttcccaacctggaccacgtgggccaccccacggagcgctgcttcgtcttctgagggccgggcacggtcacacggccacccgccccgcgcaccccacgccctgttcacgctcacccagtcacctccccacatcgcacactggggccccgggttcagcctggcctgcccgtgccctggtgaatcacctggctgagcagttcccctggagccccttcgggagcagggctgtgtcccagatgggccacggctgagccttcagagtacgtcctgcctggcacttactggtccttaccagagacgcccagccccatccctgtcctcatgacccctcgtccaccccccacacacactataaggctgagggctgccagcagccccgtctgcccaccattcccggccgtggaccatagtcgggatgtcagcagacacacatgggcagcccaaagctgcaggtgccagggcccaccccagcctcgcctgtcacccccactcccgcctcagggccaggcccaggcctcaccacctgacgctgcatgagacattgacaccagaaagccctcttgggggcactgctccctaccccagggccctggccagccgggagcttggctctcctctggctagagtgggaagagggggctggccatggggccctcccagaacctcagcatttccttccagcccatccaaacactgaggcagccttggggaaccccgagctggggggttggcagcccactgcaccgcctcagggttttggggtcctgggctggggccaccatccctgatggcagaactcccacaaccacatgtatttattcctctgtcctaaaccgtcccctccttccctcacccccagcacagggggattctgagcagtgcctcttgtctgagggacatatcagtgacctcgacgttgcctttagactacagttgtgttagcctcttgcgtattggctttttcagagtcatttatgagcagaaaaaaaaaaagtaaaactttgctaatattaacccttctctagctcctcgagggtctgtgacctgcaacacaaggggtggggtcaggaaagggctggggaagacctagcattttttttttcttttttttttttttttgagacggagtctccctttgtcacccaggctggagtggcatgatctcagctcactacaacctccacctctcgggttcaagcgattctcctgcctcagcctcccgagtagctgggactaaaagtgcccaccaccacacccagctagtttttgtatttttttttttttttttttgagacggagtctcgctctgtcgcccaggctggagtgcagtggcgggatctcggctcactgcaagctccgcctcccgggttcacgccattctcctgcctcagcctcccaagtagctgggactacaggcgcccgccactacgcccggctaattttttgtatttttagtagagacggggtttcaccgttttagccgggatggtctcgatctcctgacctcgtgatccgcccgcctcggcctcccaaagtgctgggattacaggcgtgagccactgcgcccggctccagcatttatttctgatgtatctttgtggtagaaaatttggaaagtgcagagaagtatacacaggaagaaaaattcccaacccccagaggcaaaccagctgaaaccacgcaaccccagtcaccccaatgcaccgcgaggctgctgcctcctgtcagggtcagatgagcctcgaggctcaggaaagtcagaggatgccatctgcatggtggtaaattacagaggtgatgaggcaaggtgggtgtggggctgttcttaaaacggggcagcaggaaggccccaaggagatggatttgggctgggacgggaagagagagctggccatgctggggtgggtgggtgttcaaatggtggaaacagcagacgcaaaggccctgccgttggaaccagcttgtggaataaactttcagaaacaga

SEQ ID NO: 325 - DNA, 2304 bp, Homo sapiens
  ref <308>: DATABASE ACCESSION NUMBER: NCBI / NM_000754
  ref <309>: DATABASE ENTRY DATE: 2011-12-25
  ref <313>: RELEVANT RESIDUES IN SEQ ID NO: (1)..(2304)
cggcctgcgtccgccaccggaagcgccctcctaatccccgcagcgccaccgccattgccgccatcgtcgtggggcttctggggcagctagggctgcccgccgcgctgcctgcgccggaccggggcgggtccagtcccgggcgggccgtcgcgggagagaaataacatctgctttgctgccgagctcagaggagaccccagacccctcccgcagccagagggctggagcctgctcagaggtgctttgaagatgccggaggccccgcctctgctgttggcagctgtgttgctgggcctggtgctgctggtggtgctgctgctgcttctgaggcactggggctggggcctgtgccttatcggctggaacgagttcatcctgcagcccatccacaacctgctcatgggtgacaccaaggagcagcgcatcctgaaccacgtgctgcagcatgcggagcccgggaacgcacagagcgtgctggaggccattgacacctactgcgagcagaaggagtgggccatgaacgtgggcgacaagaaaggcaagatcgtggacgccgtgattcaggagcaccagccctccgtgctgctggagctgggggcctactgtggctactcagctgtgcgcatggcccgcctgctgtcaccaggggcgaggctcatcaccatcgagatcaaccccgactgtgccgccatcacccagcggatggtggatttcgctggcgtgaaggacaaggtcacccttgtggttggagcgtcccaggacatcatcccccagctgaagaagaagtatgatgtggacacactggacatggtcttcctcgaccactggaaggaccggtacctgccggacacgcttctcttggaggaatgtggcctgctgcggaaggggacagtgctactggctgacaacgtgatctgcccaggtgcgccagacttcctagcacacgtgcgcgggagcagctgctttgagtgcacacactaccaatcgttcctggaatacagggaggtggtggacggcctggagaaggccatctacaagggcccaggcagcgaagcagggccctgactgcccccccggcccccctctcgggctctctcacccagcctggtactgaaggtgccagacgtgctcctgctgaccttctgcggctccgggctgtgtcctaaatgcaaagcacacctcggccgaggcctgcgccctgacatgctaacctctctgaactgcaacactggattgttcttttttaagactcaatcatgacttctttactaacactggctagctatattatcttatatactaatatcatgttttaaaaatataaaatagaaattaagaatctaaatatttagatataactcgacttagtacatccttctcaactgccattcccctgctgcccttgacttgggcaccaaacattcaaagctccccttgacggacgctaacgctaagggcggggcccctagctggctgggttctgggtggcacgcctggcccactggcctcccagccacagtggtgcagaggtcagccctcctgcagctaggccaggggcacctgttagccccatggggacgactgccggcctgggaaacgaagaggagtcagccagcattcacacctttctgaccaagcaggcgctggggacaggtggaccccgcagcagcaccagcccctctgggccccatgtggcacagagtggaagcatctccttccctactccccactgggccttgcttacagaagaggcaatggctcagaccagctcccgcatccctgtagttgcctccctggcccatgagtgaggatgcagtgctggtttctgcccacctacacctagagctgtccccatctcctccaaggggtcagactgctagccacctcagaggctccaagggcccagttcccaggcccaggacaggaatcaaccctgtgctagctgagttcacctgcaccgagaccagcccctagccaagattctactcctgggctcaaggcctggctagcccccagccagcccactcctatggatagacagaccagtgagcccaagtggacaagtttggggccacccagggaccagaaacagagcctctgcaggacacagcagatgggcacctgggaccacctccacccagggccctgccccagacgcgcagaggcccgacacaagggagaagccagccacttgtgccagacctgagtggcagaaagcaaaaagttcctttgctgctttaatttttaaattttcttacaaaaatttaggtgtttaccaatagtcttattttggcttatttttaa

SEQ ID NO: 326 - DNA, 2937 bp, Homo sapiens
  ref <308>: DATABASE ACCESSION NUMBER: NCBI / NM_002406
  ref <309>: DATABASE ENTRY DATE: 2011-11-26
  ref <313>: RELEVANT RESIDUES IN SEQ ID NO: (1)..(2937)
gggttgcgccagggagccggaaagccgactcccgaagttggggtcctgggaaaacttgggtcctgggttgactgagaagcggcggggaaaggaggcgggccaggaggagggggcctggcggacgccggccggggggcggggcgcggcggggctgtcggtcacgcccctcagtccgccccgccccgccccgcctgccggggaagggccacgttgcccgcccggccgtccggccccggcgcgccgcagaaagggctggcgagtcgaaaggcgaggcggccgcggcagcgcttgggacgcgcctgggcaccgggctcgctccctgcgccccggagcaggccaagttcggggccaggacgtcgggaggacctggtgcatggctgcctcctaatcccatagtccagaggaggcatccctaggactgcgggcaagggagccgggcaagcccagggcagccttgaaccgtcccctggcctgccctccccggtgggggccaggatgctgaagaagcagtctgcagggcttgtgctgtggggcgctatcctctttgtggcctggaatgccctgctgctcctcttcttctggacgcgcccagcacctggcaggccaccctcagtcagcgctctcgatggcgaccccgccagcctcacccgggaagtgattcgcctggcccaagacgccgaggtggagctggagcggcagcgtgggctgctgcagcagatcggggatgccctgtcgagccagcgggggagggtgcccaccgcggcccctcccgcccagccgcgtgtgcctgtgacccccgcgccggcggtgattcccatcctggtcatcgcctgtgaccgcagcactgttcggcgctgcctggacaagctgctgcattatcggccctcggctgagctcttccccatcatcgttagccaggactgcgggcacgaggagacggcccaggccatcgcctcctacggcagcgcggtcacgcacatccggcagcccgacctgagcagcattgcggtgccgccggaccaccgcaagttccagggctactacaagatcgcgcgccactaccgctgggcgctgggccaggtcttccggcagtttcgcttccccgcggccgtggtggtggaggatgacctggaggtggccccggacttcttcgagtactttcgggccacctatccgctgctgaaggccgacccctccctgtggtgcgtctcggcctggaatgacaacggcaaggagcagatggtggacgccagcaggcctgagctgctctaccgcaccgactttttccctggcctgggctggctgctgttggccgagctctgggctgagctggagcccaagtggccaaaggccttctgggacgactggatgcggcggccggagcagcggcaggggcgggcctgcatacgccctgagatctcaagaacgatgacctttggccgcaagggtgtgagccacgggcagttctttgaccagcacctcaagtttatcaagctgaaccagcagtttgtgcacttcacccagctggacctgtcttacctgcagcgggaggcctatgaccgagatttcctcgcccgcgtctacggtgctccccagctgcaggtggagaaagtgaggaccaatgaccggaaggagctgggggaggtgcgggtgcagtatacgggcagggacagcttcaaggctttcgccaaggctctgggtgtcatggatgaccttaagtcgggggttccgagagctggctaccggggtattgtcaccttccagttccggggccgccgtgtccacctggcgcccccactgacgtgggagggctatgatcctagctggaattagcacctgcctgtccttcctgggcccctccttgccacatcatgagctgaggtgggaccacagtccccaggctgcatcggcctgcctgtgtttccctcttaggtgcatttatctttttgatttttccgagtggcatttaagtgcacaaatgataacaagaggattattctcccgttctcaagggagtcagatcaggggaactattctagggtatgttgcggggtattaagcaggaaaccactgtgtggtggggggcactgggcttgttggggccagaaatgtccacgtcctgagctttctcctggagcatgtgcagagagtttggcaacgttcgctctcttgaccagaccccttctccctgacctggctcttccagccagggcacgagccctccttctatacctgctccccttcccccagtggggactgagttatgggagaaggggacatatttgtggccaaaatgatactaaccaaaggggcttccttgtcagggcctggtggagttggtgggtcatcggggctcactgcctcctgcccttctctcctgtctgacccccacttagcccttctctccttgcagcctagcagtttatagttctgagatggaaagttgaagggggcaagcaagacctctcctcagcccatgcccagctgtcaggagagaggtgcagggaggaaggccttgtgctgggacaacctctctcttgccttacctcagagagggactatgccctgacccctcctttctgaaaatcagtgccctccctgttgctctaggaggctcctgctggcttggtagaagacagaattcgatctgcctgtccctttttcccctggggtttgacacacaggctcctctcagcatgaggtggagcagtgaccaggtggagcagtgaccaggacgcctctggcccagtgctgcccagcctccccgcccgctcccaggcgccccatgtcctcacaggccaggacgccatggcaggatggagaggacttggtggatttttgtttcttgcctgacctcagtttcatgaaagaaagtggaagctacagaattattttctaaaataaaggctgaattgtctgaaaaataaaaaaaaaaaa

SEQ ID NO: 327 - DNA, 3063 bp, Homo sapiens
  ref <308>: DATABASE ACCESSION NUMBER: NCBI / NM_003752
  ref <309>: DATABASE ENTRY DATE: 2011-11-19
  ref <313>: RELEVANT RESIDUES IN SEQ ID NO: (1)..(3063)
cttctctctcggcgtttccgctgtcagggccctgcggtgtgactcgcgggctcagctggtccggccgtagcacctccgcgccgtcgccatgtcgcggtttttcaccaccggttcggacagcgagtccgagtcgtccttgtccggggaggagctcgtcaccaaacctgtcggaggcaactatggcaaacagccattgttgctgagcgaggatgaagaagataccaagagagttgtccgcagtgccaaggacaagaggtttgaggagctgaccaaccttatccggaccatccgtaatgccatgaagattcgtgatgtcaccaagtgcctggaagagtttgagctcctgggaaaagcatatgggaaggccaaaagcattgtggacaaagaaggtgtcccccggttctatatccgcatcctggctgacctagaggactatcttaatgagctttgggaagataaggaagggaagaagaagatgaacaagaacaatgccaaggctctgagcaccttgcgtcagaagatccgaaaatacaaccgtgatttcgagtcccatatcacaagctacaagcagaaccccgagcagtctgcggatgaagatgctgagaaaaatgaggaggattcagaaggctcttcagatgaggatgaggatgaggacggagtcagtgctgcaactttcttgaagaagaaatcagaagctccttctggggagagtcgcaagttcctcaaaaagatggatgatgaagatgaggactcagaagattccgaagatgatgaagactgggacacaggttccacatcttccgattccgactcagaggaggaagaagggaaacaaaccgcgctggcctcaagatttcttaaaaaggcacccaccacagatgaggacaagaaggcagccgagaagaaacgggaggacaaagctaagaagaagcacgacaggaaatccaagcgcctggatgaggaggaggaggacaatgaaggcggggagtgggaaagggtccggggcggagtgccgttggttaaggagaagccaaaaatgtttgccaagggaactgagatcacccatgctgttgttatcaagaaactgaatgagatcctacaggcacgaggcaagaagggaactgatcgtgctgcccagattgagctgctgcaactgctggttcagattgcagcggaaaacaacctgggagagggcgtcattgtcaagatcaagttcaatatcatcgcctctctctatgactacaaccccaacctggcaacctacatgaagccagagatgtgggggaagtgcctggactgcatcaatgagctgatggatatcctgtttgcaaatcccaacatttttgttggagagaatattctggaagagagtgagaacctgcacaacgctgaccagccactgcgtgtccgtggctgcatcctaactctggtggaacgaatggatgaagaatttaccaaaataatgcaaaatactgaccctcactcccaagagtacgtggagcacttgaaggatgaggcccaggtgtgtgccatcatcgagcgtgtgcagcgctacctggaggagaagggcactaccgaggaggtctgccgcatctacctgctgcgcatcctgcacacctactacaagtttgattacaaggcccatcagcgacagctgaccccgcctgagggctcctcaaagtctgagcaagaccaggcagaaaatgagggcgaggactcggctgtgttgatggagagactgtgcaagtacatctacgccaaggaccgcacagaccggatccgcacatgtgccatcctctgccacatctaccaccatgctctgcactcgcgctggtaccaggcccgcgacctcatgctcatgagccacttgcaggacaacattcagcatgcagacccgccagtgcagatcctttacaaccgcaccatggtgcagctgggcatctgtgccttccgccaaggcctgaccaaggacgcacacaacgccctgctggacatccagtcgagtggccgagccaaggagcttctgggccagggcctgctgctgcgcagcctgcaggagcgcaaccaggagcaggagaaggtggagcggcgccgtcaggtccccttccacctgcacatcaacctggagctgctggagtgtgtctacctggtgtctgccatgctcctggagatcccctacatggccgcccatgagagcgatgcccgccgacgcatgatcagcaagcagttccaccaccagctgcgcgtgggcgagcgacagcccctgctgggtccccctgagtccatgcgggaacatgtggtcgctgcctccaaggccatgaagatgggtgactggaagacctgtcacagttttatcatcaatgagaagatgaatgggaaagtgtgggaccttttccccgaggctgacaaagtccgcaccatgctggttaggaagatccaggaagagtcactgaggacctacctcttcacctacagcagtgtctatgactccatcagcatggagacgctgtcagacatgtttgagctggatctgcccactgtgcactccatcatcagcaaaatgatcattaatgaggagctgatggcctccctggaccagccaacacagacagtggtgatgcaccgcactgagcccactgcccagcagaacctggctctgcagctggccgagaagctgggcagcctggtggagaacaacgaacgggtgtttgaccacaagcagggcacctacgggggctacttccgagaccagaaggacggctaccgcaaaaacgagggctacatgcgccgcggtggctaccgccagcagcagtctcagacggcctactgagctctccactctgtttcccgcctgggccatccaaccttgaagtcctaaaccacacctcagtcactaaaggtctgtttaaagttgttctggttgattgcttgttgccacaaaggtgtgttgagcccattcatttgctgattatatttctgagctgctaccacatgacagacacaaggctcagatgaagaggtgaattgaacacgttcctgacctcaaaaaaaaaaaaaaaaaaa

SEQ ID NO: 328 - DNA, 688 bp, Homo sapiens
  ref <308>: DATABASE ACCESSION NUMBER: NCBI / NM_001355
  ref <309>: DATABASE ENTRY DATE: 2011-11-21
  ref <313>: RELEVANT RESIDUES IN SEQ ID NO: (1)..(688)
gatcccggtgccagggaccctgcccagttccaggcgtcgccctgacccagaaacgactgggcgccgccgtcctggaaaggccccagcgcacggacatctgaggagctgtttccgttcctctgcccgccatgccgttcctggagctggacacgaatttgcccgccaaccgagtgcccgcggggctggagaaacgactctgcgccgccgctgcctccatcctgggcaaacctgcggaccgcgtgaacgtgacggtacggccgggcctggccatggcgctgagcgggtccaccgagccctgcgcgcagctgtccatctcctccatcggcgtagtgggcaccgccgaggacaaccgcagccacagcgcccacttctttgagtttctcaccaaggagctagccctgggccaggaccggatacttatccgctttttccccttggagtcctggcagattggcaagatagggacggtcatgacttttttatgattgggcacggagggatccagggcatctgtgaactggctgcttcttccagagagatctcttggcagagtgagggcctggagataaccagctttggattatcccgcatgcaacattcctgtgatcacataatcctcttcttcatcctcatatgaaataaatgaagagagcttcctcattcaaacatgaaaaaaaaaaaaaaaaaa

SEQ ID NO: 329 - DNA, 5119 bp, Homo sapiens
  ref <308>: DATABASE ACCESSION NUMBER: NCBI / NM_004960
  ref <309>: DATABASE ENTRY DATE: 2011-12-25
  ref <313>: RELEVANT RESIDUES IN SEQ ID NO: (1)..(5119)
acttaagcttcgacgcaggaggcggggctgctcagtcctccaggcgtcggtactcagcggtgttggaacttcgttgcttgcttgcctgtgcgcgcgtgcgcggacatggcctcaaacgattatacccaacaagcaacccaaagctatggggcctaccccacccagcccgggcagggctattcccagcagagcagtcagccctacggacagcagagttacagtggttatagccagtccacggacacttcaggctatggccagagcagctattcttcttatggccagagccagaacacaggctatggaactcagtcaactccccagggatatggctcgactggcggctatggcagtagccagagctcccaatcgtcttacgggcagcagtcctcctaccctggctatggccagcagccagctcccagcagcacctcgggaagttacggtagcagttctcagagcagcagctatgggcagccccagagtgggagctacagccagcagcctagctatggtggacagcagcaaagctatggacagcagcaaagctataatccccctcagggctatggacagcagaaccagtacaacagcagcagtggtggtggaggtggaggtggaggtggaggtaactatggccaagatcaatcctccatgagtagtggtggtggcagtggtggcggttatggcaatcaagaccagagtggtggaggtggcagcggtggctatggacagcaggaccgtggaggccgcggcaggggtggcagtggtggcggcggcggcggcggcggtggtggttacaaccgcagcagtggtggctatgaacccagaggtcgtggaggtggccgtggaggcagaggtggcatgggcggaagtgaccgtggtggcttcaataaatttggtggccctcgggaccaaggatcacgtcatgactccgaacaggataattcagacaacaacaccatctttgtgcaaggcctgggtgagaatgttacaattgagtctgtggctgattacttcaagcagattggtattattaagacaaacaagaaaacgggacagcccatgattaatttgtacacagacagggaaactggcaagctgaagggagaggcaacggtctcttttgatgacccaccttcagctaaagcagctattgactggtttgatggtaaagaattctccggaaatcctatcaaggtctcatttgctactcgccgggcagactttaatcggggtggtggcaatggtcgtggaggccgagggcgaggaggacccatgggccgtggaggctatggaggtggtggcagtggtggtggtggccgaggaggatttcccagtggaggtggtggcggtggaggacagcagcgagctggtgactggaagtgtcctaatcccacctgtgagaatatgaacttctcttggaggaatgaatgcaaccagtgtaaggcccctaaaccagatggcccaggagggggaccaggtggctctcacatggggggtaactacggggatgatcgtcgtggtggcagaggaggctatgatcgaggcggctaccggggccgcggcggggaccgtggaggcttccgagggggccggggtggtggggacagaggtggctttggccctggcaagatggattccaggggtgagcacagacaggatcgcagggagaggccgtattaattagcctggctccccaggttctggaacagctttttgtcctgtacccagtgttaccctcgttattttgtaaccttccaattcctgatcacccaagggtttttttgtgtcggactatgtaattgtaactatacctctggttcccattaaaagtgaccattttagttaaattttgttcctcttcccccttttcactttcctggaagatcgatgtcccgatcaggaaggtagagagttttcctgttcagattaccctgcccagcaggaactggaatacagtgttcggggagaaggccaaatgatatccttgagagcagagattaaacttttctgtcatggggaaagttggtgtataaatgagaaatgaagaacatgggatgtcatgagtgttggcctaaatttgcccagctatggggaatttttcctttaccacatttatttgcatactggtcttagtttatttgcagcagtttatccctttttaagaactctttgatcttttggcccttttaatggtgaggctcaaacaaactacatttaaatggggcagtattcagatttgaccatggtggagagcgcttagccactctgggtctttcacaggaaggagagtaactgagtgctgcaggagtttgtggagtggagtcaggatctaggaggtgagtgactcccttcctagctgccctggtgaacagcgcttgggtagatacctgctataaggagactggtctggctgggttactttcacatcctgcctgtactcagagggcttgaggtcattgacattatgagattttaggcttgatccctttttgattggagggtggaaggccctcctaagggaatgataagtgataagagggggaaggggttgcagccaatgagttaaaaccttagagcagtgctcctcagcctcttaccatgtggttgtaaacttgcacgtacctgccaaccagttatttagcatgctttttattttagttacacagagcgtaacattaacccaagagcagaaaggttttatttacagggttttcgaacttggtttgtaagacagctgccatcacaagcatagcttacaaatgtgctggggacccctaattgggaagtgctttcctctcaaatttttattttttatttttagagacagagtcttgctctgtcatccaggctggagtgcagtggcgtgatctcggctcactgtagcctctgcctcctgagtttaagcgattctcctgcctcaggagaatcccagcttctgagtagctgagactacaggcgtgggccaccatgcccacctagtttttgcatttttagtggaggtgtggtttcactgtgttggccaggctggtctcttaactcctgacctcaggtgatccacctgccttggcctcccaaagtgctggaattacaggcatgagccgctgcatctggccatcctctcaaattttcaagtgttccacaagtatgttctctactgaagagttgctgcatccttgaatcttgggtgatttgaggcacagaaactatgactttattttttgagatggagttttgctcttgttgcccaggctggagtgcaatggcacgtttttcggcttaccgcaactgccgcctcctgggttcaagcgatagctgggattacaggcatgcgccaccatgcccagctaatttatttgtatttttagtagagacggggtttctccatgttggtcaggctggtctcgaactcccgacctcaggtgatgtgcacacctcagcctcccaataaaccatgacttttaagaggaatagcaggtttacttcccctgccagcattggggtgctctctaagcaacagtaggcggagagtggtctggcgtattaaaaacaaaggatcgtcaagtgggccttcccaggcattgctttgacttagtacatgtagaggatgtggcagttctctccgtccctgccactgctggtttctttgttaaatgtttagttgaaatggcctgatacgatatttgagtagttcactgttggtgctttgcctagcaggattctaatcttgctttggttgtggtcccctgatgccctcctgttaggagtggaggaggtcgaagctccttgtaagatatgattactgggaccattagtgtcaagttcctgtgtccttcaaatggcatatgtgattggccttgaccttaaaaggaaatagggtcccaggtgactgtttagtgggtaggtccagtttggggggatcttccaggagaatggatagagacacctagcagcagagagaacattggtgcctctcaagccaacctcccacctcagcctcccaagtagctgggactacaggtgcttcctcgctaccacacctgggtaattttttttttaattacttttttttttttaagaaacagggtttcactgggttgcccaggctggtcttgaactggcctcaagtgacctgcctgcctcagcctcccaaagtgctgggatcacaggtgtgacccactgcgtttggccagaatactctattcttactgaatgattgaaatctgtcttgaagcattaggtgtcccatttttgtgagttggaattgggacaggctaagtaggaagtgaggagggtggggagagctgtgctgtaggtctgtttgtcccttccttgatgtagccttcagttagccctttcagcttttttccccatcttgtgccgggccttcctgggtttcagtacttggatgtagggctgcagttatgtcagtggtgggtagattgaccaggaattaaggtctagggtccagcccatgtgagacttgactcactgatctacctttaggcatgtcttccttccagtctcatcctttttaaattttttttttttttttgagacggtctcactctcacccaggctggattgcagtggtgtgatctcgaccaactgcaacctctgcctcccacccgcaagctatctgcccacctcagcctctggagtagctgggacgggactacaggcacctgccaccatgactggctaatttttttttgtattttttgtggagatggggtcttgccatgttgctcaggctggtctggtctcaaaactgctctgggctcaagtgattgtcccactttggcctcccagagtgctgggattaaggtgtgagatactgtgtccggctatgaaaattttatttttaattaacttgtatatatttatggggtacaatgtcctatttctgtacatgtacacattgtggaatcaaatcaggctaatatatccatcacttcatatcattagcatgaatgagaacatacaaagccactcttagaaaattttgaaatttatgttatttcagcccttttatgctggaggttgcaaatgttttgtgaataatcagaccaaaaataaaaacaaaaaatgattgacttcagtcattcagtaagaa

SEQ ID NO: 330 - DNA, 4525 bp, Homo sapiens
  ref <308>: DATABASE ACCESSION NUMBER: NCBI / NM_004729
  ref <309>: DATABASE ENTRY DATE: 2011-12-24
  ref <313>: RELEVANT RESIDUES IN SEQ ID NO: (1)..(4525)
cgcgggcggcgcggaagcggcggcggcgcggccggggcagccatgtcgccattgtctgcggcgcgggcggccctgcgggtctacgcggtaggcgccgcggtgatcctggcgcagctgctgcggcgctgccgcgggggcttcctggagccaggtccccacgcatgagcagccgtccagcaggcaggctccggtggagaagcaatggagaataaaagcctggagagctcccagacagacctgaagctggtggcccacccccgcgccaagagcaaggtgtggaagtatttcggcttcgacaccaacgccgagggatgcatcctgcagtggaagaaaatctactgccgcatctgcatggcccagatcgcctactccggaaacacctccaacctgtcctaccacctggagaagaaccaccccgaggaattctgcgagttcgtcaagagcaacacggagcagatgcgtgaagccttcgccaccgccttctccaagctgaagcccgagtcgtcccagcagcccgggcaggacgcgctggccgtcaaggccggccacggctacgacagcaagaagcagcaggagctgacggccgccgtgctgggcctcatctgcgaggggctgtacccagcctccatcgtggacgagcccaccttcaaggtgctgctgaagacggccgacccccggtatgagctgcccagccggaagtacatctctaccaaggccatccctgagaagtacggggccgtccgggaggtgatcctgaaggagctggccgaggccacctggtgtggcatctccaccgacatgtggaggagtgagaatcagaaccgcgcctacgtcacgctggccgcccacttcctgggcctgggcgcccccaactgcctgtccatgggctcccgctgcctgaagaccttcgaggtgcccgaagagaacacggcggagaccatcacgcgagtgctctatgaggtcttcatcgagtggggcatcagcgccaaggtcttcggggccaccaccaactatggcaaggacatcgtgaaggcgtgctccctgctggacgtcgcagtgcacatgccctgcctgggccacaccttcaatgccggcatccagcaggccttccagctcccgaagctgggggcgctgctgtcgcgctgccgcaaactggtggagtacttccagcagtctgccgtggccatgtacatgctctatgagaagcagaagcagcagaacgtggcccactgcatgctggtgagcaaccgcgtctcctggtgggggagcacgctggccatgctgcagcgcctcaaggagcagcagttcgtcatcgccggggtcttggtggaggacagcaacaaccaccacctcatgctggaggccagcgagtgggccaccatcgaggggctggtggagctcctgcagcccttcaagcaggtggccgagatgctgtcggcctccaggtaccccaccatcagcatggtgaagccgctgctgcacatgctcctgaacaccacgctcaacatcaaggagaccgactccaaggagctcagcatggccaaggaggtcatcgccaaggagctttccaagacctaccaggagacgcccgagatcgacatgtttctcaacgtggccaccttcctggacccccgctacaagaggctgcccttcctctccgccttcgagcggcagcaggtggagaatcgcgtggtggaagaggccaagggcctgctggacaaggtcaaagacggcggctaccggccggctgaggacaagatcttcccggtgcccgaggagcctcccgtcaagaagctcatgcggacatccacgccgccgcccgccagcgtcatcaacaacatgctggccgagatcttctgccagacaggcggcgtggaggaccaggaagagtggcatgcccaggtggtggaggagctgagcaacttcaagtcccagaaggtgcttggcctcaacgaagaccccctcaagtggtggtcagaccgcctggccctcttccccctgctgcccaaggtgctgcagaagtactggtgcgtgacggccacgcgcgtcgcccctgagcgtctcttcggatccgccgccaacgtggtcagcgccaagaggaaccggctggctcccgcgcacgtggacgagcaggtgtttctgtatgagaacgcccggagtggggcagaggcggaacccgaggaccaggacgagggggagtggggcctggaccaggagcaggtgttctccttgggggatggcgtcagcggcggtttctttggcattagggacagcagcttcctgtagcgaggaagcgtgttgtcttacaagtcatccccgcagcagcccattggatgctttgctgtaaatacttacccggtcagcttggttttgaacctcagagaccatccactgtctttgacacctagaaggtggaaaaaggaaagagatttgagaagtgagagagggtcgggggcggtggctcctgtctataatcgcagcactttgggaggccgaggtgggcagatcagctgaggtcaggagatcgagaccagcctggccaacatggcgaaaccccgtctctactaaaaatacaaaaattagccaggactgatggcatgtgcctgtaatcccagcttctggaggctgaggccagagaatcgcttgaacctgggaggtggaggttgcagtaagctgagatcgctgcactccagcctgggcgacaagagcgagactctctcaaaaagaaaaaagaagacacaagagaggtggctttgagtgggtttcctttcctcccctattcccggggcccggacgacttctgcttgggaactgccaacgcttctgcttgggaattgcgtgcagcagagcctagaggagctgttccttccttcacagatacttaagacctccaccatgtctgattcgagttctccctgggagggtttagaagaaacgcaggaacattctgggtggcgtcgaaggagcctttcccgatcatcatgtgtgacttctgcgaggtccagatcactgaattcatgtttacattctcgtgcaagcagggacctcttgcttctgagaaatggggaagagaccttttagccaaaatgcccttcttaaaaagagagacctttttttttaatgttcggttaaaaatgtgacagatgagtacaaaaatgcagacacttaacaaaaagcaaacagaaaaaaaagtgtggaatgtgttgtattttcgacaggttgctgccagagagcctgcttcctgctgcctgccgaaatttcactttgcggagttggtccttaaaactgggcggtggccgggcgtggtggctcacgctgaggtcaggagttcgagaccagcctggccaaccaacatggtgaaacctcgtgtctactaaaaatacaagaaactagccagatgcggtggcacccgcctgtaatcccagctactcgggaggctgaggcggaagattcgcttgagcccaggaggtggaggttgcagtgagccaagactacgccactgcactccagcctggaggccagagtgagactccgtctcaaaacaaaacaaaagtgggtggctcacgggtccggaggttatgtcttcggtgtctcagccctaaaagtccagttcccccgtgcggccagcttttccacataaggtgtttttgatttgattaccggaaaggactcttgattcttctcttttaaactgaataccataggggaaatgaattttaaaatattgcccccggaggggttttccgtggctggattcctgcgagttgctttcagtcattcagggaaacagaaagacgttttccaacatgtagaactgctttttaactggaggaaaaatacttcaggaggcttagcatattgcttggattctacgtgcagcgggttctctgcctccgtgaagacaagctgggctggggagaacggtgtctaggagggatgaccccactcagctccaggcagtgttctgccgagaccccaagaactcggggtgtcagagggcaaaggaactacctgcctttcacggctgctgacttctcagggctgcaagcagcacagaatgttatccttacgtcctgagccggtttaagtctgtggaaaaggaagcacgggagaaatccacgtaacctttgctttctttttaagggaagcggttccgccgtgaacttggaaccctcagctccgggtgttctcggcagaagggcagctggaagggacacagtggggcaggctttggggttgctccctgttctgccccgaggccggggacgcagggcagcccacgcctccgtgggctccattctgtagcattgccagcgttctcttcacgtctctaacaatccttcgcttttcctcactcacgtggaaatgtgaactgtcccggctctgtcttcatttttatttttaagccatcgttcccctcctgaacggttgccccttatttaatgctgtaaagttggactgttgttcaataaaccagagcaatgcattagctcctcattcatttgtcaaaaaaaaaaaaaaaaaa

SEQ ID NO: 331 - DNA, 3715 bp, Homo sapiens
  ref <308>: DATABASE ACCESSION NUMBER: NCBI / NM_004587
  ref <309>: DATABASE ENTRY DATE: 2011-11-21
  ref <313>: RELEVANT RESIDUES IN SEQ ID NO: (1)..(3715)
cggcgatcccggcggagggggccgttcgccagctctgaggcagaaagtgccacgactccacacgcgcgcacgcagccagcgagcggccggagcggacggcagacggggcgggcggcgtcagggtcgcagcgtctacagctgctcgggggcggtttcttggcggaggcttggccggctcctctctcccggctccgcggcggctgcgaaggcggcggctcctgccctctcgctttccctctcgcgtctctggctgcaggtgaaaggaaagcaagccaggatggatatttacgacactcaaaccttgggggttgtggtctttggaggattcatggttgtttctgccattggcatcttcctggtgtcgactttctccatgaaggaaacgtcatatgaagaagccctagccaaccagcgcaaggagatggcgaaaactcaccaccagaaagtcgagaagaaaaagaaggagaaaacagtggagaagaaaggaaagaccaagaaaaaggaagagaaacctaatgggaagatacctgatcatgatccagcccccaatgtgactgtcctccttcgagaaccagtgcgggctcctgctgtggctgtggctccaaccccagtgcagccccccattatcgttgctcctgtcgccacagttccagccatgccccaggagaagctggcctcctcccccaaggacaaaaagaagaaggagaaaaaagtggcaaaagtggaaccagctgtcagctctgtagtgaattccatccaggttctcacttcgaaggctgccatcttggaaactgctcccaaggagggcagaaatacagatgtggcccagagcccagaggcaccaaagcaagaggctcctgccaagaagaagtctggttcaaagaaaaaagggcccccagatgccgacggccctctctacctcccctacaagacgctggtctccacggttgggagcatggtgttcaacgagggcgaggcccagcggctcatcgagatcctgtctgagaaggctggcatcattcaggacacctggcacaaggccactcagaagggtgaccctgtggcgattctgaaacgccagctggaagagaaggaaaaactgctggccacagaacaggaagatgcggctgtcgccaagagcaaactgagggagctcaacaaggagatggcagcagaaaaggccaaagcagcagccggggaggccaaagtgaaaaagcagctggtggcccgggagcaggagatcacggctgtgcaggcacgcatgcaggccagctaccgggagcacgtgaaggaggtgcagcagctgcagggcaagatccggactcttcaggagcagctggagaatggccccaacacgcagctggcccgcctgcagcaggagaactccatcctgcgggatgccttgaaccaggccacgagccaggtggagagcaagcagaacgcagagctggccaagcttcggcaggagctcagcaaggtcagcaaagagctggtggagaagtcagaggctgtgcggcaagatgagcagcagcggaaagctctggaagccaaggcagctgccttcgagaagcaggtcctgcagctgcaggcgtcccacagggagagtgaggaggccctgcagaagcgcctggacgaggtcagccgggagctgtgccacacgcagagcagccacgccagcctccgggcggatgccgagaaggcccaggagcaacagcagcagatggccgagctgcacagcaagttacagtcctccgaggcggaggtgcgcagcaaatgcgaggagctgagtggcctccacgggcagctccaggaggccagggcggagaactcccagctcacagagagaatccgttccattgaggccctgctggaggcgggccaggcgcgggatgcccaggacgtccaggccagccaggcggaggctgaccagcagcagactcgcctcaaggagctggagtcccaggtgtcgggtctggagaaggaggccatcgagctcagggaggccgtcgagcagcagaaagtgaagaacaatgacctccgggagaagaactggaaggccatggaggcactggccacggccgagcaggcctgcaaggagaagctgcactccctgacccaggccaaggaggaatcggagaagcagctctgtctgattgaggcgcagaccatggaggccctgctggctctgctcccagaactctctgtcttggcacaacagaattacaccgagtggctgcaggatctcaaagagaaaggccccacgctgctgaagcacccgccagctcccgcggagccctcctcggacctggcctccaagttgagggaggccgaggagacgcagagcacactgcaggccgagtgtgaccagtaccgcagcatcctggcggagacggagggcatgctcagagacctgcagaagagcgtggaggaggaggagcaggtgtggagggccaaggtgggcgccgcagaggaggagctccagaagtcccgggtcacagtgaagcatctcgaagagattgtagagaagctaaaaggagaacttgaaagttcggaccaggtgagggagcacacgtcgcatttggaggcagagctggaaaagcacatggcggccgccagcgccgagtgccagaactacgccaaggaggtggcagggctgaggcaacttctcctagaatctcaatctcagctcgatgccgccaagagcgaagcccagaaacagagcgatgagcttgccctggtcaggcagcagttgagtgaaatgaagagccacgtagaggatggtgacatagctggggccccagcttcctccccagaggcgcccccagccgagcaggaccccgttcagctgaagacgcagctggagtggacagaagccatcctggaggatgagcagacacagcggcagaagctcacggccgagtttgaggaggctcagacctcggcatgtcggttacaagaagaattggagaagctccgcacagccggccccctagagtcttcagaaacagaggaggcctcacagctgaaggagagactagaaaaagagaagaagttaacaagtgacctggggcgcgccgccacgagactgcaggagcttctgaagacgacccaggagcagctggcaagggagaaggacacggtgaagaagctgcaggaacagctggaaaaggcagaggacggcagcagctcaaaggagggcacctctgtctgagtttcctctttggaaaaagaagttactgttcaacttaccaaaatgccttacacattccttacaaataaaccaaccaacctacacagcgttatccaggcccaacttccggtagctccgagagaagccatgagagacaagtctcttagagccacagaagtagaccttccagagccccagtttgtaaatgaacctgtgtcacatttgataaacactatcctgggcgcagccccgggccaccgccgagtgacgccaaagccctggttgactctgacagccccgtgggtgtgtgggaggccgggcgctctggggtctgtctgtcagtgcaatcgtttagtgttttttcagtggggcggggcgggaagcgggtgggaccgggcagccagttctcaaaggctgtggggccgactggaggccacagcccctcacccctagacgttgccaaccagaactgacgtgtgacctcctgggtgttgatgccattaaaaccaacgttggtgcccggtg

SEQ ID NO: 332 - DNA, 584 bp, Homo sapiens
  ref <308>: DATABASE ACCESSION NUMBER: NCBI / NM_004552
  ref <309>: DATABASE ENTRY DATE: 2011-11-28
  ref <313>: RELEVANT RESIDUES IN SEQ ID NO: (1)..(584)
gctgcaaacgtctcgctgaggtcatcctttacggcaggcgtccgcgtcgctagctagtcgttctgaagcggcggccagagaagagtcaagggcacgagcatcgggtagccatgcctttcttggacatccagaaaaggttcggccttaacatagatcgatggttgacaatccagagtggtgaacagccctacaagatggctggtcgatgccatgcttttgaaaaagaatggatagaatgtgcacatggaatcggttatactcgggcagagaaagagtgcaagatagaatatgatgatttcgtagagtgtttgcttcggcagaaaacgatgagacgtgcaggtaccatcaggaagcagcgggataagctgataaaggaaggaaagtacacccctccacctcaccacattggcaagggggagcctcggccctgaacagagcagctgctgatgtctggaggctgattttcctgttctctgttctccactggaaaggttgtttacgacaaacctccttgtcaaagtgtgtaaaaataaaggattgctccatcctatttgttctattttctcttggaaaaaaaaaaaaaa

SEQ ID NO: 333 - DNA, 801 bp, Homo sapiens
  ref <308>: DATABASE ACCESSION NUMBER: NCBI / NM_004450
  ref <309>: DATABASE ENTRY DATE: 2011-12-18
  ref <313>: RELEVANT RESIDUES IN SEQ ID NO: (1)..(801)
gcggcgttgtagttaagctcgtgtaacggcggcggtgtcggcagctgctgtagcgaagagagtttggcgcgatgtctcacaccattttgctggtacagcctaccaagaggccagaaggcagaacttatgctgactacgaatctgtgaatgaatgcatggaaggtgtttgtaaaatgtatgaagaacatctgaaaagaatgaatcccaacagtccctctatcacatatgacatcagtcagttgtttgatttcatcgatgatctggcagacctcagctgcctggtttaccgagctgatacccagacataccagccttataacaaagactggattaaagagaagatctacgtgctccttcgtcggcaggcccaacaggctgggaaataattgtgttggaagcactgggggggttggggtgggcttggaacacaggtgtgtacagcgtgctgtagtggaagttttgtatcatagtaatcctgtttccactttgttatactctagccaagattgactgtattagatgaaatgtgaggatcttgttcaatcggaaacccccgttacctcctctttttctttctctttctttttttttttttacttaaacatttttatgatgatttagatggaagttgttcttcgtcacttaatgttggttccagtccttcaactgttcatatctactttataacattcacatactaacccttcttcaagatggggtggggggtggaaatgcagtttagccatgtcctcaagataaagtcttggtaaaaataaataaatgtcctttagttatattttc

SEQ ID NO: 334 - DNA, 987 bp, Homo sapiens
  ref <308>: DATABASE ACCESSION NUMBER: NCBI / NM_004048
  ref <309>: DATABASE ENTRY DATE: 2011-12-18
  ref <313>: RELEVANT RESIDUES IN SEQ ID NO: (1)..(987)
aatataagtggaggcgtcgcgctggcgggcattcctgaagctgacagcattcgggccgagatgtctcgctccgtggccttagctgtgctcgcgctactctctctttctggcctggaggctatccagcgtactccaaagattcaggtttactcacgtcatccagcagagaatggaaagtcaaatttcctgaattgctatgtgtctgggtttcatccatccgacattgaagttgacttactgaagaatggagagagaattgaaaaagtggagcattcagacttgtctttcagcaaggactggtctttctatctcttgtactacactgaattcacccccactgaaaaagatgagtatgcctgccgtgtgaaccatgtgactttgtcacagcccaagatagttaagtgggatcgagacatgtaagcagcatcatggaggtttgaagatgccgcatttggattggatgaattccaaattctgcttgcttgctttttaatattgatatgcttatacacttacactttatgcacaaaatgtagggttataataatgttaacatggacatgatcttctttataattctactttgagtgctgtctccatgtttgatgtatctgagcaggttgctccacaggtagctctaggagggctggcaacttagaggtggggagcagagaattctcttatccaacatcaacatcttggtcagatttgaactcttcaatctcttgcactcaaagcttgttaagatagttaagcgtgcataagttaacttccaatttacatactctgcttagaatttgggggaaaatttagaaatataattgacaggattattggaaatttgttataatgaatgaaacattttgtcatataagattcatatttacttcttatacatttgataaagtaaggcatggttgtggttaatctggtttatttttgttccacaagttaaataaatcataaaacttgatgtgttatctctta

SEQ ID NO: 335 - DNA, 1516 bp, Homo sapiens
  ref <308>: DATABASE ACCESSION NUMBER: NCBI / NM_000239
  ref <309>: DATABASE ENTRY DATE: 2011-12-18
  ref <313>: RELEVANT RESIDUES IN SEQ ID NO: (1)..(1516)
aaatactggggccagctcaccctggtcagcctagcactctgacctagcagtcaacatgaaggctctcattgttctggggcttgtcctcctttctgttacggtccagggcaaggtctttgaaaggtgtgagttggccagaactctgaaaagattgggaatggatggctacaggggaatcagcctagcaaactggatgtgtttggccaaatgggagagtggttacaacacacgagctacaaactacaatgctggagacagaagcactgattatgggatatttcagatcaatagccgctactggtgtaatgatggcaaaaccccaggagcagttaatgcctgtcatttatcctgcagtgctttgctgcaagataacatcgctgatgctgtagcttgtgcaaagagggttgtccgtgatccacaaggcattagagcatgggtggcatggagaaatcgttgtcaaaacagagatgtccgtcagtatgttcaaggttgtggagtgtaactccagaattttccttcttcagctcattttgtctctctcacattaagggagtaggaattaagtgaaaggtcacactaccattatttccccttcaaacaaataatatttttacagaagcaggagcaaaatatggcctttcttctaagagatataatgttcactaatgtggttattttacattaagcctacaacatttttcagtttgcaaatagaactaatactggtgaaaatttacctaaaaccttggttatcaaatacatctccagtacattccgttctttttttttttgagacagtctcgctctgtcgcccaggctggagtgcagtggcgcaatctcggctcactgcaacctccacctcccgggttcacgccattctcctgcctcagcctcccgagtagctgggattacgggcgcccgccaccacgcccggctaattttttgtatttttagtagagacagggtttcaccgtgttagccaggatggtctcgatctcctgaccttgtgatccacccacctcggcctcccaaagtgctgggattacaggcgtgagccactgcgcccggccacattcagttcttatcaaagaaataacccagacttaatcttgaatgatacgattatgcccaatattaagtaaaaaatataagaaaaggttatcttaaatagatcttaggcaaaataccagctgatgaaggcatctgatgccttcatctgttcagtcatctccaaaaacagtaaaaataaccactttttgttgggcaatatgaaatttttaaaggagtagaataccaaatgatagaaacagactgcctgaattgagaattttgatttcttaaagtgtgtttctttctaaattgctgttccttaatttgattaatttaattcatgtattatgattaaatctgaggcagatgagcttacaagtattgaaataattactaattaatcacaaatgtgaagttatgcatgatgtaaaaaatacaaacattctaattaaaggctttgcaacac

SEQ ID NO: 336 - DNA, 811 bp, Homo sapiens
  ref <308>: DATABASE ACCESSION NUMBER: NCBI / NM_000269
  ref <309>: DATABASE ENTRY DATE: 2011-12-17
  ref <313>: RELEVANT RESIDUES IN SEQ ID NO: (1)..(811)
gcagaagcgttccgtgcgtgcaagtgctgcgaaccacgtgggtcccgggcgcgtttcgggtgctggcggctgcagccggagttcaaacctaagcagctggaaggaaccatggccaactgtgagcgtaccttcattgcgatcaaaccagatggggtccagcggggtcttgtgggagagattatcaagcgttttgagcagaaaggattccgccttgttggtctgaaattcatgcaagcttccgaagatcttctcaaggaacactacgttgacctgaaggaccgtccattctttgccggcctggtgaaatacatgcactcagggccggtagttgccatggtctgggaggggctgaatgtggtgaagacgggccgagtcatgctcggggagaccaaccctgcagactccaagcctgggaccatccgtggagacttctgcatacaagttggcaggaacattatacatggcagtgattctgtggagagtgcagagaaggagatcggcttgtggtttcaccctgaggaactggtagattacacgagctgtgctcagaactggatctatgaatgacaggagggcagaccacattgcttttcacatccatttcccctccttcccatgggcagaggaccaggctgtaggaaatctagttatttacaggaacttcatcataatttggagggaagctcttggagctgtgagttctccctgtacagtgttaccatccccgaccatctgattaaaatgcttcctcccagcataggattcattgagttggttacttcatattgttgcattgcttttttttccttct

SEQ ID NO: 337 - DNA, 2087 bp, Homo sapiens
  ref <308>: DATABASE ACCESSION NUMBER: NCBI / NM_000431
  ref <309>: DATABASE ENTRY DATE: 2011-11-12
  ref <313>: RELEVANT RESIDUES IN SEQ ID NO: (1)..(2087)
attgaccaatgttcaagcctattggtaaaggtactccgggctcgcgcgctctgattggctggcctgaagtacaacgcctcctccccttgaggcacgggcgctctgggttgtgggagttggggagctgctccggcttcggcgcggaggggcggcggccggggaggcggcggcggcggcaggattcccaggagccatgttgtcagaagtcctactggtgtctgctccggggaaagtcatccttcatggagaacatgccgtggtacatggcaaggtagcactggctgtatccttgaacttgagaacattcctccggcttcaaccccacagcaatgggaaagtggacctcagcttacccaacattggtatcaagcgggcctgggatgtggccaggcttcagtcactggacacaagctttctggagcaaggtgatgtcacaacacccacctcagagcaagtggagaagctaaaggaggttgcaggcttgcctgacgactgtgctgtcaccgagcgcctggctgtgctggcctttctttacttatacctgtccatctgccggaagcagagggccctgccgagcctggatatcgtagtgtggtcggagctgccccccggggcgggcttgggctccagcgccgcctactcggtgtgtctggcagcagccctcctgactgtgtgcgaggagatcccaaacccgctgaaggacggggattgcgtcaacaggtggaccaaggaggatttggagctaattaacaagtgggccttccaaggggagagaatgattcacgggaacccctccggagtggacaatgctgtcagcacctggggaggagccctccgataccatcaagggaagatttcatccttaaagaggtcgccagctctccagatcctgctgaccaacaccaaagtccctcgcaataccagggcccttgtggctggcgtcagaaacaggctgctcaagttcccagagatcgtggcccccctcctgacctcaatagatgccatctccctggagtgtgagcgcgtgctgggagagatgggggaagccccagccccggagcagtacctcgtgctggaagagctcattgacatgaaccagcaccatctgaatgccctcggcgtgggccacgcctctctggaccagctctgccaggtgaccagggcccgcggacttcacagcaagctgactggcgcaggcggtggtggctgtggcatcacactcctcaagccagggctggagcagccagaagtggaggccacgaagcaggccctgaccagctgtggctttgactgcttggaaaccagcatcggtgcccccggcgtctccatccactcagccacctccctggacagccgagtccagcaagccctggatggcctctgagaggagcccacgacactgcagccccacccagatgcccctttctggattattctgggggctgcagttcgactctgtgctggccagcgagcgcccagctcctgacactgctggagaggccccagccgcttggcgatgccagccaagctctgcagtcccagcggtgggacctagggaggcatggtctgccctctgcatcctctggagccagccgagcaggaggcctaggagggtcctctgagactccagacctgaggcgagaagggctgcttccctgaagctcccacagtcccatctgcttcaggcccccgccttggcctgtgttcttcctggccgcctgggtccaatgctcaggtgctggggcctggttcccggagaagtgtgccttctctctcccttttcagggaccgccccctgtctctcagggccaggcctctccctcctccaggaagccttcccctaccccttgtcgcccctccctcccagagcacctgctgtctgggtggctcactcagcacttggtgtggccttcccttctacctagcgggatggggctcccccaggggctgtcccggaggcggtgggcctggttaaataaggcagggtttatatgcactttcttccgatctgtacctgagaggtttgtggaaaagatggcaaatggggaataaaaagattttgtgtcaacagtaaaaaaaaaaaaaaa

SEQ ID NO: 338 - DNA, 2787 bp, Homo sapiens
  ref <308>: DATABASE ACCESSION NUMBER: NCBI / NM_001247
  ref <309>: DATABASE ENTRY DATE: 2011-11-26
  ref <313>: RELEVANT RESIDUES IN SEQ ID NO: (1)..(2787)
gtgcatggggcggagcccaggccctagggaatcgtggggtcgtatcccgcgggtggaggccggggtggcgccggccggggcgggggagcccaaaagaccggctgccgcctgctccccggaaaagggcactcgtctccgtgggtgtggcggagcgcgcggtgcatggaatgggctatgtgaatgaaaaaaggtatccgttatgaaacttccagaaaaacgagctacatttttcagcagccgcagcacggtccttggcaaacaaggatgagaaaaatatccaaccacgggagcctgcgggtggcgaaggtggcataccccctggggctgtgtgtgggcgtgttcatctatgttgcctacatcaagtggcaccgggccaccgccacccaggccttcttcagcatcaccagggcagccccgggggcccggtggggtcagcaggcccacagccccctggggacagctgcagacgggcacgaggtcttctacgggatcatgtttgatgcaggaagcactggcacccgagtacacgtcttccagttcacccggccccccagagaaactcccacgttaacccacgaaaccttcaaagcactgaagccaggtctttctgcctatgctgatgatgttgaaaagagcgctcagggaatccgggaactactggatgttgctaaacaggacattccgttcgacttctggaaggccacccctctggtcctcaaggccacagctggcttacgcctgttacctggagaaaaggcccagaagttactgcagaaggtgaaagaagtatttaaagcatcgcctttccttgtaggggatgactgtgtttccatcatgaacggaacagatgaaggcgtttcggcgtggatcaccatcaacttcctgacaggcagcttgaaaactccaggagggagcagcgtgggcatgctggacttgggcggaggatccactcagatcgccttcctgccacgcgtggagggcaccctgcaggcctccccacccggctacctgacggcactgcggatgtttaacaggacctacaagctctattcctacagctacctcgggctcgggctgatgtcggcacgcctggcgatcctgggcggcgtggaggggcagcctgctaaggatggaaaggagttggtcagcccttgcttgtctcccagtttcaaaggagagtgggaacacgcagaagtcacgtacagggtttcagggcagaaagcagcggcaagcctgcacgagctgtgtgctgccagagtgtcagaggtccttcaaaacagagtgcacaggacggaggaagtgaagcatgtggacttctatgctttctcctactattacgaccttgcagctggtgtgggcctcatagatgcggagaagggaggcagcctggtggtgggggacttcgagatcgcagccaagtacgtgtgtcggaccctggagacacagccgcagagcagccccttctcatgcatggacctcacctacgtcagcctgctactccaggagttcggctttcccaggagcaaagtgctgaagctcactcggaaaattgacaatgttgagaccagctgggctctgggggccatttttcattacatcgactccctgaacagacagaagagtccagcctcatagtggccgagccatccctgtccccgtcagcagtgtctgtgtgtctgcataaaccctcctgtcctggacgtgacttcatcctgaggagccacagcacaggccgtgctggcactttctgcacactggctctgggacttgcagaaggcctggtgctgccctggcatcagcctcttccagtcacatctggccagagggctgtctggacctgggccctgctcaatgccacctgtctgcctgggctccaagtgggcaggaccaggacagaaccacaggcacacactgagggggcagtgtggctccctgcctgtcccatccccatgccccgtccgcggggctgtggctgctgctgtgcatgtccctgcgatgggagtcttgtctcccagcctgtcagtttcctccccagggcagagctccccttcctgcaagagtctgggaggcggtgcaggctgtcctggctgctctggggaagccgagggacagccataacacccccgggacagtaggtctgggcggcaccactgggaactctggacttgagtgtgtttgcctcttccttgggtatgaatgtgtgagttcacccagaggcctgctctcctcacacattgtgtggtttggggttaatgatggagggagacacctcctcatagacggcaggtgcccacctttcagggagtctcccagcatgggcggatgccgggcatgagctgctgtaaactatttgtggctgtgctgcttgagtgacgtctctgtcgtgtgggtgccaagtgcttgtgtagaaactgtgttctgagcccccttttctggacaccaactgtgtcctgtgaatgtatcgctactgtgagctgttcccgcctagccagggccatgtcttaggtgcagctgtgccacgggtcagctgagccacagtcccagaaccaagctctcggtgtctcgggccaccatccgcccacctcgggctgaccccacctcctccatggacagtgtgagccccgggccgtgcatcctgctcagtgtggcgtcagtgtcggggctgagccccttgagctgcttcagtgaatgtacagtgcccggcacgagctgaacctcatgtgttccactcccaataaaaggttgacaggggcttctccttcaaaaaaaaaaaaaaaaaaaaaaaaa

SEQ ID NO: 339 - DNA, 1636 bp, Homo sapiens
  ref <308>: DATABASE ACCESSION NUMBER: NCBI / NM_003365
  ref <309>: DATABASE ENTRY DATE: 2011-11-20
  ref <313>: RELEVANT RESIDUES IN SEQ ID NO: (1)..(1636)
cagtctacgcttgcgcggcgcaacagggccgactgcagctggaagatggcggcgtccgtggtctgtcgggccgctaccgccggggcacaagtgctattgcgcgcccgccgctcgccggccctgctgcggacgccagccttgcggagtacggcaaccttcgctcaggcgctccagttcgtgccggagacgcaggttagcctgctggacaacggcctgcgtgtggcctccgagcagtcctctcagcccacttgcacggtgggagtgtggattgatgttggcagccgttttgagactgagaagaataatggggcaggctactttttggagcatctggctttcaagggaacaaagaatcggcctggcagtgccctggagaaggaggtggagagcatgggggcccatcttaatgcctacagcacccgggagcacacagcttactacatcaaggcgctgtccaaggatctgccgaaagctgtggagctcctgggtgacattgtgcagaactgtagtctggaagactcacagattgagaaggaacgtgatgtgatcctgcgggagatgcaggagaatgatgcatctatgcgagatgtggtctttaactacctgcatgccacagcattccagggcacacctctagcccaggctgtggaggggcccagtgagaatgtcaggaagctgtctcgtgcagacttgaccgagtacctcagcacacattacaaggcccctcgaatggtgctggcagcagctggaggagtggagcaccagcaactgttagacctcgcccagaagcacctcggtggcatcccatggacatatgcagaggacgctgtgcccactcttactccatgccgcttcactggcagtgagatccgccaccgtgatgatgctctaccttttgcccacgtggccattgcagtagagggtcctggctgggccagcccggacaatgtggccttgcaagtggccaatgccatcatcggccactatgactgcacttatggtggtggcgtgcacctgtccagcccactggcttcaggtgctgtggccaacaagctatgccagagtttccagaccttcagcatctgctatgcagagacgggcttgctgggtgcacactttgtctgtgaccgaatgaaaatcgatgacatgatgttcgtcctgcaagggcagtggatgcgcctgtgtaccagtgccacggagagtgaggtggcccggggcaaaaacatcctcagaaatgccctggtatctcatctagatggcactactcctgtgtgtgaggacatcggacgcagcctcctgacctatggccgccgcatccccctggctgaatgggaaagccggattgcggaggtggatgccagtgtggtacgtgagatctgctccaagtacatctatgaccagtgcccagcagtggctggatatggccccattgagcagctcccagactacaaccggatccgtagcggcatgttctggctgcgcttctaggcgggaagcctatgtaagcaagagggcagggccggggtttgtggtcccccccccaccacaaacacagcacttcggctcctctaacctgtgccacaggtgaccaccaataaaatcctctgctgagaagtgaaaaaaaaaaaaaaaaaaa

SEQ ID NO: 340 - DNA, 886 bp, Homo sapiens
  ref <308>: DATABASE ACCESSION NUMBER: NCBI / NM_003329
  ref <309>: DATABASE ENTRY DATE: 2011-12-25
  ref <313>: RELEVANT RESIDUES IN SEQ ID NO: (1)..(886)
ctcgcaggctccaggggcggggcgtggccggggcgcagcgacgggcgcggaggtccggccgggcgcgcgcgcccccgccacacgcacgccgggcgtgccagtttataaagggagagagcaagcagcgagtcttgaagctctgtttggtgctttggatccatttccatcggtccttacagccgctcgtcagactccagcagccaagatggtgaagcagatcgagagcaagactgcttttcaggaagccttggacgctgcaggtgataaacttgtagtagttgacttctcagccacgtggtgtgggccttgcaaaatgatcaagcctttctttcattccctctctgaaaagtattccaacgtgatattccttgaagtagatgtggatgactgtcaggatgttgcttcagagtgtgaagtcaaatgcatgccaacattccagttttttaagaagggacaaaaggtgggtgaattttctggagccaataaggaaaagcttgaagccaccattaatgaattagtctaatcatgttttctgaaaatataaccagccattggctatttaaaacttgtaatttttttaatttacaaaaatataaaatatgaagacataaacccagttgccatctgcgtgacaataaaacattaatgctaacactttttaaaaccgtctcatgtctgaatagctttcaaaataaatgtgaaatggtcatttaatgtattttcctatattctcaatcactttttagtaaccttgtaggccactgattattttaagattttaaaaattattattgctaccttaatgtattgctacaaaaatctcttgttgggggcaatgcaggtaataaagtagtatgttgttatttgtaaaaaaaaaaaaaaaaaa

SEQ ID NO: 341 - DNA, 1621 bp, Homo sapiens
  ref <308>: DATABASE ACCESSION NUMBER: NCBI / NM_001069
  ref <309>: DATABASE ENTRY DATE: 2011-10-13
  ref <313>: RELEVANT RESIDUES IN SEQ ID NO: (1)..(1621)
gcggcaggtctctgcgcagcccagcccgccggtccacgccgcgcaccgctccgagggccagcgccacccgctccgcagccggcaccatgcgcgagatcgtgcacatccaggcgggccagtgcggcaaccagatcggcgccaagttttgggaggtcatcagcgatgagcatgggatcgaccccacaggcagttaccatggagacagtgacttgcagctggagagaatcaacgtgtactacaatgaggctgctggtaacaaatatgtacctcgggccatcctggtggatctggagcctggcaccatggactctgtcaggtctggacccttcggccagatcttcagaccagacaacttcgtgttcggccagagtggagccgggaataactgggccaagggccactacacagagggagccgagctggtcgactcggtcctggatgtggtgaggaaggagtcagagagctgtgactgtctccagggcttccagctgacccactctctggggggcggcacggggtccgggatgggcaccctgctcatcagcaagatccgggaagagtacccagaccgcatcatgaacaccttcagcgtcatgccctcacccaaggtgtcagacacggtggtggagccctacaacgccaccctctctgtccaccagctggtggaaaacacagatgaaacctactccattgataacgaggccctgtatgacatctgcttccgcaccctgaagctgaccacccccacctacggggacctcaaccacctggtgtcggccaccatgagcggggtcaccacctgcctgcgcttcccgggccagctgaacgcagacctgcgcaagctggcggtgaacatggtgcccttccctcgcctgcacttcttcatgcccggcttcgcgcccctgaccagccggggcagccagcagtaccgggcgctcacggtgcccgagctcacccagcagatgttcgactccaagaacatgatggccgcctgcgacccgcgccacggccgctacctgacggtggctgccatcttccggggccgcatgtccatgaaggaggtggacgagcagatgctcaacgtgcagaacaagaacagcagctacttcgtggagtggatccccaacaacgtgaagacggccgtgtgcgacatcccgccccgcggcctgaagatgtcggccaccttcatcggcaacagcacggccatccaggagctgttcaagcgcatctccgagcagttcacggccatgttccggcgcaaggccttcctgcactggtacacgggcgagggcatggacgagatggagttcaccgaggccgagagcaacatgaacgacctggtgtccgagtaccagcagtaccaggacgccacggccgacgaacaaggggagttcgaggaggaggagggcgaggacgaggcttaaaaacttctcagatcaatcgtgcatccttagtgaacttctgttgtcctcaagcatggtctttctacttgtaaactatggtgctcagttttgcctctgttagaaattcacactgttgatgtaatgatgtggaactcctctaaaaattacagtattgtctgtgaaggtatctatactaataaaaaagcatgtgtagaaaa

SEQ ID NO: 342 - DNA, 4882 bp, Homo sapiens
  ref <308>: DATABASE ACCESSION NUMBER: NCBI / NM_000356
  ref <309>: DATABASE ENTRY DATE: 2011-12-18
  ref <313>: RELEVANT RESIDUES IN SEQ ID NO: (1)..(4882)
gaaagaggagccggaagtgtggcgcgcgaggtctaagggcgcgagggaagtggcgggcggggactaaggcggggcgtgcaggtagccggccggccgggggtcgcgggtatggccgaggccaggaagcggcgggagctacttcccctgatctaccaccatctgctgcgggctggctatgtgcgtgcggcgcgggaagtgaaggagcagagcggccagaagtgtttcctggctcagcccgtaacccttctggacatctatacacactggcaacaaacctcagagcttggtcggaagcggaaggcagaggaagatgcggcactgcaagctaagaaaacccgtgtgtcagaccccatcagcacctcggagagctcggaagaggaggaagaagcagaagccgaaaccgccaaagccaccccaagactagcatctaccaactcctcagtcctgggggcggacttgccatcaagcatgaaagaaaaagccaaggcagagacagagaaagctggcaagactgggaattccatgccacaccctgccactgggaagacggtggccaaccttctttctgggaagtctcccaggaagtcagcagagccctcagcaaatactacgttggtctcagaaactgaggaggagggcagcgtcccggcctttggagctgctgccaagcctgggatggtgtcagcgggccaggccgacagctccagcgaggacacctccagctccagtgatgagacagacgtggaggtaaaggcctctgaaaaaattctccaggtcagagctgcctcagcccctgccaaggggacccctgggaaaggggctaccccagcaccccctgggaaggcaggggctgtagcctcccagaccaaggcagggaagccagaggaggactcagagagcagcagcgaggagtcatctgacagtgaggaggagacgccagctgccaaggccctgcttcaggcgaaggcctcaggaaaaacctctcaggtcggagctgcctcagcccctgccaaggagtcccccaggaaaggagctgccccagcgccccctgggaagacagggcctgcagttgccaaggcccaggcggggaagcgggaggaggactcgcagagcagcagcgaggaatcggacagtgaggaggaggcgcctgctcaggcgaagccttcagggaaggccccccaggtcagagccgcctcggcccctgccaaggagtcccccaggaaaggggctgccccagcacctcctaggaaaacagggcctgcagccgcccaggtccaggtggggaagcaggaggaggactcaagaagcagcagcgaggagtcagacagtgacagagaggcactggcagccatgaatgcagctcaggtgaagcccttggggaaaagcccccaggtgaaacctgcctctaccatgggcatggggcccttggggaaaggcgccggcccagtgccacccgggaaggtggggcctgcaaccccctcagcccaggtggggaagtgggaggaggactcagagagcagtagtgaggagtcatcagacagcagtgatggagaggtgcccacagctgtggccccggctcaggaaaagtccttggggaacatcctccaggccaaacccacctccagtcctgccaaggggccccctcagaaggcagggcctgtagccgtccaggtcaaggctgaaaagcccatggacaactcggagagcagcgaggagtcatcggacagtgcggacagtgaggaggcaccagcagccatgactgcagctcaggcaaaaccagctctgaaaattcctcagaccaaggcctgcccaaagaaaaccaataccactgcatctgccaaggtcgcccctgtgcgagtgggcacccaagccccccggaaagcaggaactgcgacttctccagcaggctcatccccagctgtggctgggggcacccagagaccagcagaggattcttcaagcagtgaggaatcagatagtgaggaagagaagacaggtcttgcagtaaccgtgggacaggcaaagtctgtggggaaaggcctccaggtgaaagcagcctcagtgcctgtcaaggggtccttggggcaagggactgctccagtactccctgggaagacggggcctacagtcacccaggtgaaagctgaaaagcaggaagactctgagagcagtgaggaggaatcagacagtgaggaagcagctgcatctccagcacaggtgaaaacctcagtaaagaaaacccaggccaaagccaacccagctgccgccagagcaccttcagcaaaagggacaatttcagcccctggaaaagttgtcactgcagctgctcaagccaagcagaggtctccatccaaggtgaagccaccagtgagaaacccccagaacagtaccgtcttggcgaggggcccagcatctgtgccatctgtggggaaggccgtggctacagcagctcaggcccagacagggccagaggaggactcagggagcagtgaggaggagtcagacagtgaggaggaggcggagacgctggctcaggtgaagccttcagggaagacccaccagatcagagctgccttggctcctgccaaggagtcccccaggaaaggggctgccccaacacctcctgggaagacagggccttcggctgcccaggcagggaagcaggatgactcagggagcagcagcgaggaatcagacagtgatggggaggcaccggcagctgtgacctctgcccaggtgattaaaccccctctgatttttgtcgaccctaatcgtagtccagctggcccagctgctacacccgcacaagcccaggctgcaagcaccccgaggaaggcccgagcctcggagagcacagccaggagctcctcctccgagagcgaggatgaggacgtgatccccgctacacagtgcttgactcctggcatcagaaccaatgtggtgaccatgcccactgcccacccaagaatagcccccaaagccagcatggctggggccagcagcagcaaggagtccagtcggatatcagatggcaagaaacaggagggaccagccactcaggtgtcaaagaagaacccagcttccctcccactgacccaggctgccctgaaggtcctcgcccagaaagccagtgaggctcagcctcctgttgccaggacccagccttcaagtggggttgacagtgctgtgggaacactccctgcaacaagtccccagagcacctccgtccaggccaaagggaccaacaagctcagaaaacctaagcttcctgaggtccagcaggccaccaaagcccctgagagctcagatgacagtgaggacagcagcgacagttcttcagggagtgaggaagatggtgaagggccccagggggccaagtcagcccacacgctgggtcccaccccctccaggacagagaccctggtggaggagaccgcagcagagtccagcgaggatgatgtggtggcgccatcccagtctctcctctcaggttatatgacccctggactaaccccagccaattcccaggcctcaaaagccactcccaagctagactccagcccctcagtttcctctactctggccgccaaagatgacccagatggcaagcaggaggcaaagccccaacaggcagcaggcatgttgtcccctaaaacaggtggaaaagaggctgcttcaggcaccacacctcagaagtcccggaagcccaagaaaggggctgggaacccccaagcctcaaccctggcgctgcaaagcaacatcacccagtgcctcctgggccaaccctggcccctgaatgaggcccaggtgcaggcctcagtggtgaaggtcctgactgagctgctggaacaggaaagaaagaaggtggtggacaccaccaaggagagcagcaggaagggctgggagagccgcaagcggaagctatcgggagaccagccagctgccaggacccccaggagcaagaagaagaagaagctgggggccggggaaggtggggaggcctctgtttccccagaaaagacctccacgacttccaaggggaaagcaaagagagacaaagcaagtggtgatgtcaaggagaagaaagggaaggggtctcttggctcccaaggggccaaggacgagccagaagaggagcttcagaaggggatggggacggttgaaggtggagatcaaagcaacccaaagagcaagaaggagaagaagaaatccgacaagagaaaaaaagacaaagaaaaaaaagaaaagaagaagaaagcaaaaaaggcctcaaccaaagattctgagtcaccgtcccagaagaaaaagaagaaaaagaagaagacagcagagcagactgtatgacgagcaccagcaccaggcacagggatttcctagccgagcagtggccatccccatgcctctgacctccaccgacctctgcccaccatgggttggaactaaactgttaccttccctcgctccacagaagaagacagccagcttcaggggtccctgtgctggccaagccagtgagcctgcggggaggctggtccaaggagaaagtggaccagctcccatgacctcaccccactcccccaacacaggacgcttcatatagatgtgtacagtatatgtatttttttaagtgacctcctctccttccacagaccccacatgcccaaaggcctcgggacttcccaccaccttgctccacagatccagctaggcctgacctgtgcctcatcccgtgccgctcggtctctggctgatcccgaggctttgtcttcctctcgtcagttcttttggttgtgttttttgttttttttttaataactcaaaaaaaaaataaaagacttggaggaagggtgcaagctcccagtgcaaaaaaaaaaaaaaaaaa

SEQ ID NO: 343 - DNA, 1126 bp, Homo sapiens
  ref <308>: DATABASE ACCESSION NUMBER: NCBI / NM_003134
  ref <309>: DATABASE ENTRY DATE: 2011-11-26
  ref <313>: RELEVANT RESIDUES IN SEQ ID NO: (1)..(1126)
ccagcctaggccgaacttccggctctcactgctaggggcttaagcggagggagtcgagccagcgtcgccgcgatggtgttgttggagagcgagcagttcctgacggagctgaccagacttttccagaagtgccggacgtcgggcagcgtctatatcaccttgaagaagtatgacggtcgaaccaaacccattccaaagaagggtactgtggagggctttgagcccgcagacaacaagtgtctgttaagagctaccgatgggaagaagaagatcagcactgtggtgagctccaaggaagtgaataagtttcagatggcttattcaaacctccttagagctaacatggatgggctgaagaagagagacaaaaagaacaaaactaagaagaccaaagcagcagcagcagcagcagcagcagcacctgccgcagcagcaacagcaccaacaacagcagcaacaacagcagcaacagcagcacagtaaagggcatacatttcctgctttcaccaattaaccactgaattgctattttttccttttggccagatagctaggtttctggttcccccacagtaggtgttttcacataagattagggtccttttggaaagaatagttgcagtgtttataggatagttgtggtaagaatctagtttattttgcatttggctaattggtctgtgctgcatggttatatactcctggattatagattaaaagtctctgtagacatctctgtgaagagcaagctatcattaaacatgtctgtttatcagcactgtctctttattcctttcccaacccattttaatagttctggcaataactactaaatctagaatgatgtgattaatgaataggctttagctctataatatcttctaggttattagaattgaaacctgacagttttataaaaagtcatgttatctcatgagctgcttcccacctggctgtataattttatcatcatggttccccagtttcgatgagttctcacagtcaaatgagagtttgtttaaccaccttaggagaaacatactacaaagtcatcaagaataaaggttccaaagtaattatgatttttggtttctttatgccctttggtttggatattttcatgtgc

SEQ ID NO: 344 - DNA, 4343 bp, Homo sapiens
  ref <308>: DATABASE ACCESSION NUMBER: NCBI / NM_003131
  ref <309>: DATABASE ENTRY DATE: 2012-01-01
  ref <313>: RELEVANT RESIDUES IN SEQ ID NO: (1)..(4343)
aatggggagcggaggtgccggaaccacggaccaatggggcgggggcgctggggctcaccatataaggagcggcctcgccataaaaggaaacattgtatctctttatatggggggaagggtcgggggatccctccgccgccagcgcgtggtcccggccccctccacccgccgtctcggccgcggccagcagcccctgccccccgggggacgctgacggccgcccggcgcgccgccctagcagacggacagggggcgctgcgcgcggcctggggcaacccgggccacaggggcaggaaagtgagggcccaggtcggcccgggcgtgcaggggccccgggttcgcagcggcggccgcggcagcgatagcggcactagcagcagcgggagtgccgggttgagccgggaagccgatggcggcggctgcggcggctccgattcctcgctgactgcccgtccgccctcctgcatcgagcgccatgttaccgacccaagctggggccgcggcggctctgggccggggctcggccctggggggcagcctgaaccggaccccgacggggcggccgggcggcggcggcgggacacgcggggctaacgggggccgggtccccgggaatggcgcggggctcgggcccggccgcctggagcgggaggctgcggcagcggcggcaaccaccccggcgcccaccgcgggggccctctacagcggcagcgagggcgactcggagtcgggcgaggaggaggagctgggcgccgagcggcgcggcctgaagcggagcctgagcgagatggagatcggtatggtggtcggtgggcccgaggcgtcggcagcggccaccgggggctacgggccggtgagcggcgcggtgagcggggccaagccgggtaagaagacccggggccgcgtgaagatcaagatggagttcatcgacaacaagctgcggcgctacacgaccttcagcaagaggaagacgggcatcatgaagaaggcctatgagctgtccacgctgacagggacacaggtgctgttgctggtggccagtgagacaggccatgtgtatacctttgccacccgaaaactgcagcccatgatcaccagtgagaccggcaaggcactgattcagacctgcctcaactcgccagactctccaccccgttcagaccccacaacagaccagagaatgagtgccactggctttgaagagacagatctcacctaccaggtgtcggagtctgacagcagtggggagaccaaggacacactgaagccggcgttcacagtcaccaacctgccgggtacaacctccaccatccaaacagcacctagcacctctaccaccatgcaagtcagcagcggcccctcctttcccatcaccaactacctggcaccagtgtctgctagtgtcagccccagtgctgtcagcagtgccaatgggactgtgctgaagagtacaggcagcggccctgtctcctctgggggccttatgcagctgcctaccagcttcaccctcatgcctggtggggcagtggcccagcaggtcccagtgcaggccattcaagtgcaccaggccccacagcaagcgtctccctcccgtgacagcagcacagacctcacgcagacctcctccagcgggacagtgacgctgcccgccaccatcatgacgtcatccgtgcccacaactgtgggtggccacatgatgtaccctagcccgcatgcggtgatgtatgcccccacctcgggcctgggtgatggcagcctcaccgtgctgaatgccttctcccaggcaccatccaccatgcaggtgtcacacagccaggtccaggagccaggtggcgtcccccaggtgttcctgacagcatcatctgggacagtgcagatccctgtttcagcagttcagctccaccagatggctgtgatagggcagcaggccgggagcagcagcaacctcaccgagctacaggtggtgaacctggacaccgcccacagcaccaagagtgaatgatccgcccgccgccctggacagatggcccaagggatggcaccacttatttattgttgccttttcacgttttctttacacacacgttgacgggccgcaggagggaggcggggaggaggaacgggcagccacaggactgagccctctcactccagccaaagaaatgggcctgcctgcctccacccgtcctccctcagcctccccttcttcccgccccacctcccatttctgttgctggaggggctgtcctccttcctgggaccccctcgccagcttggctcgatgtttgccatgagtattagcttacccaatgggaccgtgccccacctccccacacacaggccttctgtggggctgggcaccgtgtcctcctctgaggaagcagttggggccctcttgccagcctccttgctgaccccaggtcagccctgtgtctgtcacaggctgggtcaaaagagccctggctctgcccctcagggggccagctggggagatgggggcttcttcctcacactgctgtcctctcccccttcagctcctgagtagctgggcctgtgcactgggcaggttcctggggccgcctgccctgccttgccgctccccttggacctccaggggctcctgggttggagggaaccaccagcgttcccttctcccccttgtcttcccccctctcctcccagctgctttacttaaagttgattttgaactttttatttgaggagacgaagtgaaaacaaatctataaatatatatttttaaaatatttaacttttttttatggcgtttttctcgtccccctccctgcccaaactccccttccctggggagccctcaggctccccagaactggctgggcccctggggacagagccaccccatgagctcggggtccaccagtgtgtgggggagattctgggtttgcccagtcctgggttgtttccaggagaaagccgggggaggggccctcaggccattccccaacggggtggggagggtgacccacagctctgggcctctttttgccctttagggctgttgctagggagagggaagagggagaccaaatgtcggggttggggtgggagggcgtcaggcagaggcaactgacttcatttgtgccacacgcatgggcattgcagccttgcgctgtcccaggcatgcagctgcctggggcccaagttgcagtgagcagggtggggtctgggagggggtgagaggcaggaatgggggtcagaagaagtgggagcagcttcttgggctgagtgcagccaaaggggagccagaaatgggcagttctcccagggagtgagcagctactgtaacttttttaaattaagacaaaaagccttgaagaaaatgactttatttttctaagtgtaacctcagtatttatgtaatttgtacaggggccatgccccacccccctcctccccctttggggtagaccttgagggtgggccagcataggggggagggtcttttaccctgtgtcagagcctaccttcaccacctatatccagaaggggagctttttcagaaacagggcagcagtggggtgaaattttcttaacccctaagactgccttcagtaggaacaagctggcttctgtgattaggtgaagggatgggggaagattttatgcacagcctagttatcaaggggatgatttgccgacatgtttgagaaccccctaacctctaaccctcattgctgtcttgccccagtttggggtgccaagatggaagtcacctttctgggctttctcctggagatagctggggcttatgggtggctttcaaggctggggcatggcaaatcaggggccagagagcaggggagcttgggactcaggtctgtaactgcccagccccttttctctgctcttgtttcactccaccatcactcactcactccccactcccccacccatggggaggagacctttgatgaattcttcctctccttcccacaaaagacagacccagtgagtgaatcaggcaaagtgcttataatgtgtgttgtgtgagcgtggccttgggaggacatgcgtgtgtcagggatgagttgaggtgatatttttatgtgcagcgacccttggtgtttcccttcctcggtggctctggggtatgtgtgtgtgggtgtgtgcgcctgagtgagtgtgtgtgcttgaatgtgagtgtgtatgtcagtggtttctacttcccctgggatgctgacccaggaatagtggacatggtcacagtcctatgtacagagctttcttttgtattaaaaaaaaatactctttcaataaatgtatcatttttgtgcacagaaaaaaaaaaaaaaaaaaaaaaaaaa

SEQ ID NO: 345 - DNA, 981 bp, Homo sapiens
  ref <308>: DATABASE ACCESSION NUMBER: NCBI / NM_000454
  ref <309>: DATABASE ENTRY DATE: 2011-12-25
  ref <313>: RELEVANT RESIDUES IN SEQ ID NO: (1)..(981)
gtttggggccagagtgggcgaggcgcggaggtctggcctataaagtagtcgcggagacggggtgctggtttgcgtcgtagtctcctgcagcgtctggggtttccgttgcagtcctcggaaccaggacctcggcgtggcctagcgagttatggcgacgaaggccgtgtgcgtgctgaagggcgacggcccagtgcagggcatcatcaatttcgagcagaaggaaagtaatggaccagtgaaggtgtggggaagcattaaaggactgactgaaggcctgcatggattccatgttcatgagtttggagataatacagcaggctgtaccagtgcaggtcctcactttaatcctctatccagaaaacacggtgggccaaaggatgaagagaggcatgttggagacttgggcaatgtgactgctgacaaagatggtgtggccgatgtgtctattgaagattctgtgatctcactctcaggagaccattgcatcattggccgcacactggtggtccatgaaaaagcagatgacttgggcaaaggtggaaatgaagaaagtacaaagacaggaaacgctggaagtcgtttggcttgtggtgtaattgggatcgcccaataaacattcccttggatgtagtctgaggccccttaactcatctgttatcctgctagctgtagaaatgtatcctgataaacattaaacactgtaatcttaaaagtgtaattgtgtgactttttcagagttgctttaaagtacctgtagtgagaaactgatttatgatcacttggaagatttgtatagttttataaaactcagttaaaatgtctgtttcaatgacctgtattttgccagacttaaatcacagatgggtattaaacttgtcagaatttctttgtcattcaagcctgtgaataaaaaccctgtatggcacttattatgaggctattaaaagaatccaaattcaaactaaaaaaaaaaaaaaaaaa

SEQ ID NO: 346 - DNA, 1153 bp, Homo sapiens
  ref <308>: DATABASE ACCESSION NUMBER: NCBI / NM_003091
  ref <309>: DATABASE ENTRY DATE: 2011-11-12
  ref <313>: RELEVANT RESIDUES IN SEQ ID NO: (1)..(1153)
aactccagggctagtgagctggaccggaagtaggtttctacccgaccgcattttacgtggtgctgcatttccggtagcggcggcgggaaatcggctgtgggagagaggctaggcctctgaggaggcgaatccggcgggtatcagagccatcagaaccgccaccatgacggtgggcaagagcagcaagatgctgcagcatattgattacaggatgaggtgcatcctgcaggacggccggatcttcattggcaccttcaaggcttttgacaagcacatgaatttgatcctctgtgactgtgatgagttcagaaagatcaagccaaagaactccaaacaagcagaaagggaagagaagcgagtcctcggtctggtgctgctgcgaggggagaatctggtctcaatgacagtagagggacctcctcccaaagatactggtattgctcgagttccacttgctggagctgccgggggcccagggatcggcagggctgctggcagaggaatcccagctggggttcccatgccccaggctcctgcaggacttgctgggccagtccgtggggttggcgggccatcccaacaggtgatgaccccacaaggaagaggtactgttgcagccgctgcagctgctgccacagccagtattgccggggctccaacccagtacccacctggccgtgggggtcctcccccacctatgggccgaggagcaccccctccaggcatgatgggcccacctcctggtatgagacctcctatgggtcccccaatggggatcccccctggaagagggactccaatgggcatgccccctccgggaatgcggcctcctccccctgggatgcgaggccttctttgacccttggccacagagtatggaagtagctccgcagaggcgtgggctcgattcctcagggccacgttaccacagacctgtttgtttcttatgctgttgttcgtggagtctcatgggattgtctggtttcccttacagggccccctcccccgggaatgcgcccaccaaggccctagactcatcttggccctcctcagctccctgcctgtttcccgtaaggctgtacatagtccttttatctccttgtggcctatgaaactggtttataataaactcttaagagaacattataattgc

SEQ ID NO: 347 - DNA, 1940 bp, Homo sapiens
  ref <308>: DATABASE ACCESSION NUMBER: NCBI / NM_003089
  ref <309>: DATABASE ENTRY DATE: 2011-12-04
  ref <313>: RELEVANT RESIDUES IN SEQ ID NO: (1)..(1940)
gcggttcggcgcggaaagcgggaggtggaggggcggcttggggcaagcgcgcgcgcgcagtgcagaagccagccccccgcggctgaggtactcaaggtgcccaaaggcggggtagtgacctcgcgcgtgcgctgtgcccgcggcagcgccgggtcctagtgtgtgggttgttgttggcaccgcacggcgcgtgcgcagtgaggacggcggagggatttgcggccgggacccaccccctgctccagtcgctatcggaggccgcgcgggtggctgagcagcggcctggtgcgctcgcttagcgggcgacggaatcagacggacgtggacgcccccggagtggaagccgaagcaggagttgttgttgctgaggggctgccgcagccgccgcgagcctccggacagacgccagagcgaggagggcgctacgcgacttggcaagatgacccagttcctgccgcccaaccttctggccctctttgccccccgtgaccctattccatacctgccacccctggagaaactgccacatgaaaaacaccacaatcaaccttattgtggcattgcgccgtacattcgagagtttgaggaccctcgagatgcccctcctccaactcgtgctgaaacccgagaggagcgcatggagaggaaaagacgggaaaagattgagcggcgacagcaagaagtggagacagagcttaaaatgtgggaccctcacaatgatcccaatgctcagggggatgccttcaagactctcttcgtggcgagagtgaattatgacacaacagaatccaagctccggagagagtttgaggtgtacggacctatcaaaagaatacacatggtctacagtaagcggtcaggaaagccccgtggctatgccttcatcgagtacgaacacgagcgagacatgcactccgcttacaaacacgcagatggcaagaagattgatggcaggagggtccttgtggacgtggagaggggccgaaccgtgaagggctggaggccccggcggctaggaggaggcctcggtggtaccagaagaggaggggctgatgtgaacatccggcattcaggccgcgatgacacctcccgctacgatgagaggcccggcccctccccgcttccgcacagggaccgggaccgggaccgtgagcgggagcgcagagagcggagccgggagcgagacaaggagcgagaacggcgacgctcccgctcccgggaccggcggaggcgctcacggagtcgcgacaaggaggagcggaggcgctccagggagcggagcaaggacaaggaccgggaccggaagcggcgaagcagccggagtcgggagcgggcccggcgggagcgggagcgcaaggaggagctgcgtggcggcggtggcgacatggcggagccctccgaggcgggtgacgcgccccctgatgatgggcctccaggggagctcgggcctgacggccctgacggtccagaggaaaagggccgggatcgtgaccgggagcgacggcggagccaccggagcgagcgcgagcggcgccgggaccgggatcgtgaccgtgaccgtgaccgcgagcacaaacggggggagcggggcagtgagcggggcagggatgaggcccgaggtgggggcggtggccaggacaacgggctggagggtctgggcaacgacagccgagacatgtacatggagtctgagggcggcgacggctacctggctccggagaatgggtatttgatggaggctgcgccggagtgaagaggtcgtcctctccatctgctgtgtttggacgcgttcctgcccagccccttgctgtcatcccctcccccaaccttggccacttgagtttgtcctccaagggtaggtgtctcatttgttctggccccttggatttaaaaataaaattaatttcctgttgatagtgggcaaaaaaaaaaaaaaaaaa

SEQ ID NO: 348 - DNA, 3003 bp, Homo sapiens
  ref <308>: DATABASE ACCESSION NUMBER: NCBI / NM_003016
  ref <309>: DATABASE ENTRY DATE: 2011-11-28
  ref <313>: RELEVANT RESIDUES IN SEQ ID NO: (1)..(3003)
agaaggtttcatttccgggtggcgcgggcgccattttgtgaggagcgatataaacgggcgcagaggccggctgcccgcccagttgttactcaggtgcgctagcctgcggagcccgtccgtgctgttctgcggcaaggcctttcccagtgtccccacgcggaaggcaactgcctgagaggcgcggcgtcgcaccgcccagagctgaggaagccggcgccagttcgcggggctccgggccgccactcagagctatgagctacggccgcccccctcccgatgtggagggtatgacctccctcaaggtggacaacctgacctaccgcacctcgcccgacacgctgaggcgcgtcttcgagaagtacgggcgcgtcggcgacgtgtacatcccgcgggaccgctacaccaaggagtcccgcggcttcgccttcgttcgctttcacgacaagcgcgacgctgaggacgctatggatgccatggacggggccgtgctggacggccgcgagctgcgggtgcaaatggcgcgctacggccgccccccggactcacaccacagccgccggggaccgccaccccgcaggtacgggggcggtggctacggacgccggagccgcagccctaggcggcgtcgccgcagccgatcccggagtcggagccgttccaggtctcgcagccgatctcgctacagccgctcgaagtctcggtcccgcactcgttctcgatctcggtcgacctccaagtccagatccgcacgaaggtccaagtccaagtcctcgtcggtctccagatctcgttcgcggtccaggtcccggtctcggtccaggagtcctcccccagtgtccaagagggaatccaaatccaggtcgcgatcgaagagtccccccaagtctcctgaagaggaaggagcggtgtcctcttaagaaaatggtaatgtctgggaatccgagacacataaccctaattcataaatgggatttggggtaggtctttttgagtcgtgttaatgtaagaatgactcctatcattaggagtgctgctcggaggttactcacctttgggagtaatactgaagagaggggtctgcagaaaggatgtgtatgaagcttagataataatggctgtttcgtaaactgtttgagacctattaatgaaaatgactatttcttgctgtttttatccaacgtctgcattttccccctttaaagctgcggtctcctgtttgataaaagaatattggccagtattgcagattttaactgatttggctgatcctccagggaccagtttctgtgggcgtgtattggagcaggtttgtctttaaatgttaaagatgcactatcctcttagagaaacaatcagttcaactattgttgtactgactgggacttcatattctaatggatgtggcaaaagaattgcaataagaagcagtgaacatttggaaccccaaaagaaagttacaggtattgcactgggtggggaaaggatagtgtgtctttaactcttaaattgtttggtcctattttttaaaaaggaaagggccctaagtagctcagatattaaagtagtattctcaattaccaaatgtttcatttgaaacaatttatcttaatgaaatatagaccaattctctgatctcgagttgtttttgtttggatacagcccttttttttttctttttttttcttccccttacctttcttcaccttggttatttggccaggaatacgtaaattcaaacttgtacatgctgatggtagcctttgtgaaattttcctaattgggccttttaaaaacatggctgggtggaacatttctgtaccctactggtttgaccagagccttagtaagtacgtgcctgaaactgaaaccatgtgcactttaatggaaggtaagctgaacttctttcttttcaaacctagatgtatcggcaagcagtgtaaacggaggacttggggaaaaaggaccacatagtccatcgaagaagagtccttggaacaagcaactggctattgaaaaggttattttgtaacatttgtctaactttttacttgtttaagctttgcctcagttggcaaacttcattttatgtgccattttgttgctgttattcaaatttcttgtaatttagtgaggtgaacgacttcagatttcattattggatttggatatttgaggtaaaatttcattttgttatatagtgctgactttttttgtttgaaattaaacagattggtaacctaatttgtggcctcctgacttttaaggaaaacgtgtgcagccattacacacagcctaaagctgtcaagagattgactcggcattgccttcattccttaaaattaaaaacctacaaaagttggtgtaaatttgtatatgttatttaccttcagatctaaatggtaatctgaacccaaatttgtataaagacttttcaggtgaaaagacttgattttttgaaaggattgtttatcaaacacaattctaatctcttctcttatgtatttttgtgcactaggcgcagttgtgtagcagttgagtaatgctggttagctgttaaggtggcgtgttgcagtgcagagtgcttggctgtttcctgttttctcccgattgctcctgtgtaaagatgccttgtcgtgcagaaacaaatggctgtccagtttattaaaatgcctgacaactgcacttccagtcacccgggccttgcatataaataacggagcatacagtgagcacatctagctgatgataaatacacctttttttccctcttccccctaaaaatggtaaatctgatcatatctacatgtatgaacttaacatggaaaatgttaaggaagcaaatggttgtaactttgtaagtacttataacatggtgtatctttttgcttatgaatattctgtattataaccattgtttctgtagtttaattaaaacattttcttggtgttagcttttctcagaaaaaaaaaaaaaaaaaaaaaaaaaaaaaaaaaaaaaaaaaa

SEQ ID NO: 349 - DNA, 1782 bp, Homo sapiens
  ref <308>: DATABASE ACCESSION NUMBER: NCBI / NM_003952
  ref <309>: DATABASE ENTRY DATE: 2011-12-24
  ref <313>: RELEVANT RESIDUES IN SEQ ID NO: (1)..(1782)
ggagagatgatgtttaggtccgggactgtcagtcagtgcgcggccaggtacgggccgacgggcccgcggggccggcgccgccatggcggccgtgtttgatttggatttggagacggaggaaggcagcgagggcgagggcgagccagagctcagccccgcggacgcatgtccccttgccgagttgagggcagctggcctagagcctgtgggacactatgaagaggtggagctgactgagaccagcgtgaacgttggcccagagcgcatcgggccccactgctttgagctgctgcgtgtgctgggcaaggggggctatggcaaggtgttccaggtgcgaaaggtgcaaggcaccaacttgggcaaaatatatgccatgaaagtcctaaggaaggccaaaattgtgcgcaatgccaaggacacagcacacacacgggctgagcggaacattctagagtcagtgaagcacccctttattgtggaactggcctatgccttccagactggtggcaaactctacctcatccttgagtgcctcagtggtggcgagctcttcacgcatctggagcgagagggcatcttcctggaagatacggcctgcttctacctggctgagatcacgctggccctgggccatctccactcccagggcatcatctaccgggacctcaagcccgagaacatcatgctcagcagccagggccacatcaaactgaccgactttggactctgcaaggagtctatccatgagggcgccgtcactcacaccttctgcggcaccattgagtacatggcccctgagattctggtgcgcagtggccacaaccgggctgtggactggtggagcctgggggccctgatgtacgacatgctcactggatcgccgcccttcaccgcagagaaccggaagaaaaccatggataagatcatcaggggcaagctggcactgcccccctacctcaccccagatgcccgggaccttgtcaaaaagtttctgaaacggaatcccagccagcggattgggggtggcccaggggatgctgctgatgtgcagagacatccctttttccggcacatgaattgggacgaccttctggcctggcgtgtggacccccctttcaggccctgtctgcagtcagaggaggacgtgagccagtttgatacccgcttcacacggcagacgccggtggacagtcctgatgacacagccctcagcgagagtgccaaccaggccttcctgggcttcacatacgtggcgccgtctgtcctggacagcatcaaggagggcttctccttccagcccaagctgcgctcacccaggcgcctcaacagtagcccccgggcccccgtcagccccctcaagttctccccttttgaggggtttcggcccagccccagcctgccggagcccacggagctacctctacctccactcctgccaccgccgccgccctcgaccaccgcccctctccccatccgtcccccctcagggaccaagaagtccaagaggggccgtgggcgtccagggcgctaggaagccgggtgggggtgagggtagcccttgagccctgtccctgcggctgtgagagcagcaggaccctgggccagttccagagacctgggggtgtgtctgggggtggggtgtgagtgcgtatgaaagtgtgtgtctgctggggcagctgtgcccctgaatcatgggcacggagggccgcccgccacgccccgcgctcaactgctcccgtggaagattaaagggctgaatcatggtgctgaaaaaaaaaaaaa

SEQ ID NO: 350 - DNA, 2372 bp, Homo sapiens
  ref <308>: DATABASE ACCESSION NUMBER: NCBI / NM_002950
  ref <309>: DATABASE ENTRY DATE: 2011-11-20
  ref <313>: RELEVANT RESIDUES IN SEQ ID NO: (1)..(2372)
aacggctgctcagtggcgggagggcgggctaccgcgcccgggccctacccgccctggcgcactgctcttcccggtcatggaggcgccagccgccggcttgtttctgctcctgttgcttgggacttgggccccggcgccgggcagcgcctcctccgaggcaccgccgctgatcaatgaggacgtgaagcgcacagtggacctaagcagccacctggctaaggtgacggccgaggtggtcctggcgcacctgggcggcggctccacgtcccgagctacctctttcctgctggctttggagcctgagctcgaggcccggctggcgcacctgggcgtgcaggtaaagggagaagatgaggaagagaacaatttggaagtacgtgaaaccaaaattaagggtaaaagtgggagattcttcacagtcaagctcccagttgctcttgatcctggggccaagatttcagtcattgtggaaacagtctacacccatgtgcttcatccgtatccaacccagatcacccagtcagagaaacagtttgtggtgtttgaggggaaccattatttctactctccctatccaacgaagacacaaaccatgcgtgtgaagcttgcctctcgaaatgtggagagctacaccaagctggggaaccccacgcgctctgaggacctactggattatgggcctttcagagatgtgcctgcctatagtcaggatacttttaaagtacattatgagaacaacagccctttcctgaccatcaccagcatgacccgagtcattgaagtctctcactggggtaatattgctgtggaagaaaatgtggacttaaagcacacaggagctgtgcttaaggggcctttctcacgctatgattaccagagacagccagatagtggaatatcctccatccgttcttttaagaccatccttcctgctgctgcccaggatgtttattaccgggatgagattggcaatgtttctaccagccacctccttattttggatgactctgtagagatggaaatccggcctcgcttccctctctttggcgggtggaagacccattacatcgttggctacaacctcccaagctatgagtacctctataatttgggtgaccagtatgcactgaagatgaggtttgtggaccatgtgtttgatgaacaagtgatagattctctgactgtgaagatcatcctgcctgaaggagccaagaacattgaaattgatagtccctatgaaatcagccgtgccccagatgagctgcactacacctatctggacacatttggccgccctgtgattgttgcctacaagaaaaatctggtagaacagcacattcaggacattgtggtccactacacgttcaacaaggtgctcatgctgcaggagcccctgctggtggtggcggccttctacatcctgttcttcaccgttatcatctatgttcggctggacttctccatcaccaaggatccagccgcagaagccaggatgaaggtagcctgcatcacagagcaggtcttgaccctggtcaacaagagaataggcctttaccgtcactttgacgagaccgtcaataggtacaagcaatcccgggacatctccaccctcaacagtggcaagaagagcctggagactgaacacaaggccttgaccagtgagattgcactgctgcagtccaggctgaagacagagggctctgatctgtgcgacagagtgagcgaaatgcagaagctggatgcacaggtcaaggagctggtgctgaagtcggcggtggaggctgagcgcctggtggctggcaagctcaagaaagacacgtacattgagaatgagaagctcatctcaggaaagcgccaggagctggtcaccaagatcgaccacatcctggatgccctgtagcccctgcccgcatcctccagggggcccagggtgcctgcactttgctgtggcaggcagattgggtggtagtgggaggttgtgcatggaggccagtgaaagctgacatctgtaaaaggccttcaaggaagagaaaccaggccctgcgtcaggcagtgtgagtttgccgtttgtccttaactttctttttttttttttttaaaaaaagaaaactttaaaaaaactcccattaaaaacaaaacatctttgtgttttgaacaaaggaattttcaatatttgattggtattctgttctgaagtctaagatatttttcagcctataaagccccctgttttatgcccttctaattctgatgtttgggtattgtgtgagtgcatgtgtttttttttttttttttaaagcgtgtgtgaacaaatggaaataaagcagggactgtgaacattaaaaaaaaaaaaaaaaaaaaaaaaaaaaaaa

SEQ ID NO: 351 - DNA, 2262 bp, Homo sapiens
  ref <308>: DATABASE ACCESSION NUMBER: NCBI / NM_002743
  ref <309>: DATABASE ENTRY DATE: 2011-11-14
  ref <313>: RELEVANT RESIDUES IN SEQ ID NO: (1)..(2262)
gctgcgccgccattaagagctagccctcagaactatcctctctaaggtttcacagtcctgcccaagatggccgtctcggctctggcaccgcccccactcctgcctctcccaacatggcgaccctgagtctccgttcccggtgcggaacgtacgaccggaagtgacggggtccagaaatttccgctttctttctgcagcaggaaccgcggctgctggacaagaggggtgcggtggatactgacctttgctccggcctcgtcgtgaagacacagcgcatctccccgctgtaggcttcctcccacagaacccgtttcgggcctcagagcgtctggtgagatgctgttgccgctgctgctgctgctacccatgtgctgggccgtggaggtcaagaggccccggggcgtctccctcaccaatcatcacttctacgatgagtccaagcctttcacctgcctggacggttcggccaccatcccatttgatcaggtcaacgatgactattgcgactgcaaagatggctctgacgagccaggcacggctgcctgtcctaatggcagcttccactgcaccaacactggctataagcccctgtatatcccctccaaccgggtcaacgatggtgtttgtgactgctgcgatggaacagacgagtacaacagcggcgtcatctgtgagaacacctgcaaagagaagggccgtaaggagagagagtccctgcagcagatggccgaggtcacccgcgaagggttccgtctgaagaagatccttattgaggactggaagaaggcacgggaggagaagcagaaaaagctcattgagctacaggctgggaagaagtctctggaagaccaggtggagatgctgcggacagtgaaggaggaagctgagaagccagagagagaggccaaagagcagcaccagaagctgtgggaagagcagctggctgctgccaaggcccaacaggagcaggagctggcggctgatgccttcaaggagctggatgatgacatggacgggacggtctcggtgactgagctgcagactcacccggagctggacacagatggggatggggcgttgtcagaagcggaagctcaggccctcctcagtggggacacacagacagacgccacctctttctacgaccgcgtctgggccgccatcagggacaagtaccggtccgaggcactgcccaccgaccttccagcaccttctgcccctgacttgacggagcccaaggaggagcagccgccagtgccctcgtcgcccacagaggaggaggaggaggaggaggaggaggaggaagaagaggctgaagaagaggaggaggaggaggattccgaggaggccccaccgccactgtcacccccgcagccggccagccctgctgaggaagacaaaatgccgccctacgacgagcagacgcaggccttcatcgatgctgcccaggaggcccgcaacaagttcgaggaggccgagcggtcgctgaaggacatggaggagtccatcaggaacctggagcaagagatttcttttgactttggccccaacggggagtttgcttacctgtacagccagtgctacgagctcaccaccaacgaatacgtctaccgcctctgccccttcaagcttgtctcgcagaaacccaaactcgggggctctcccaccagccttggcacctggggctcatggattggccccgaccacgacaagttcagtgccatgaagtatgagcaaggcacgggctgctggcagggccccaaccgctccaccaccgtgcgcctcctgtgcgggaaagagaccatggtgaccagcaccacagagcccagtcgctgcgagtacctcatggagctgatgacgccagccgcctgcccggagccaccgcctgaagcacccaccgaagacgaccatgacgagctctagctggatgggcgcagagaacctcaagaaggcatgaagccagcccctgcagtgccgtccacccgcccctctgggcctgcctgtggctctgttgccctcctctgtggcggcaggacctttgtggggcttcgtgccctgctctggggcccaggcggggctggtccacattcccaggccccaacagccttcaaagatgggtaaaggagcttgccctccctgggccccccaccttggtgactcgccccaccacccccagccctgtccctgccacccctcctagtggggactagtgaatgacttgacctgtgacctcaatacaataaatgtgatcccccacccaaa

SEQ ID NO: 352 - DNA, 1177 bp, Homo sapiens
  ref <308>: DATABASE ACCESSION NUMBER: NCBI / NM_002686
  ref <309>: DATABASE ENTRY DATE: 2011-11-21
  ref <313>: RELEVANT RESIDUES IN SEQ ID NO: (1)..(1177)
ggacgattgccgctgcagccgccgccccactcacctccggtgtgtctgcagcccggacactaagggagatggatgaatgggtggggaggatgcggcgcacatggccccgggcggctcggcggtcagctgccgcccccacagcggaccggtcggggcgggggtcgggcggtagaaaaaagggccgcgaggcgagcggggcactgggcggaccgcggcggcagcatgagcggcgcagaccgtagccccaatgcgggcgcagcccctgactcggccccgggccaggcggcggtggcttcggcctaccagcgcttcgagccgcgcgcctacctccgcaacaactacgcgccccctcgcggggacctgtgcaacccgaacggcgtcgggccgtggaagctgcgctgcttggcgcagaccttcgccaccggtgaagtgtccggacgcaccctcatcgacattggttcaggccccaccgtgtaccagctgctcagtgcctgcagccactttgaggacatcaccatgacagatttcctggaggtcaaccgccaggagctggggcgctggctgcaggaggagccgggggccttcaactggagcatgtacagccaacatgcctgcctcattgagggcaagggggaatgctggcaggataaggagcgccagctgcgagccagggtgaaacgggtcctgcccatcgacgtgcaccagccccagcccctgggtgctgggagcccagctcccctgcctgctgacgccctggtctctgccttctgcttggaggctgtgagcccagatcttgccagctttcagcgggccctggaccacatcaccacgctgctgaggcctggggggcacctcctcctcatcggggccctggaggagtcgtggtacctggctggggaggccaggctgacggtggtgccagtgtctgaggaggaggtgagggaggccctggtgcgtagtggctacaaggtccgggacctccgcacctatatcatgcctgcccaccttcagacaggcgtagatgatgtcaagggcgtcttcttcgcctgggctcagaaggttgggctgtgagggctgtacctggtgccctgtggcccccacccacctggattccctgttctttgaagtggcacctaataaagaaataataccctgccaaaaaaaaaaaaaaaaaaaa

SEQ ID NO: 353 - DNA, 2516 bp, Homo sapiens
  ref <308>: DATABASE ACCESSION NUMBER: NCBI / NM_002654
  ref <309>: DATABASE ENTRY DATE: 2011-12-24
  ref <313>: RELEVANT RESIDUES IN SEQ ID NO: (1)..(2516)
agtcccaccgaaagggcaacctgcccgcgcgttccgccaccgccgccgcgcttcctcctgaaggtgactgcgcccgcggggacgcagggggcggggcccgggtcgcccggagccgggattgggcagagggcggggcggcggagggattgcggcggcccgcagcgggataaccttgaggctgaggcagtggctccttgcacagcagctgcacgcgccgtggctccggatctcttcgtctttgcagcgtagcccgagtcggtcagcgccggaggacctcagcagccatgtcgaagccccatagtgaagccgggactgccttcattcagacccagcagctgcacgcagccatggctgacacattcctggagcacatgtgccgcctggacattgattcaccacccatcacagcccggaacactggcatcatctgtaccattggcccagcttcccgatcagtggagacgttgaaggagatgattaagtctggaatgaatgtggctcgtctgaacttctctcatggaactcatgagtaccatgcggagaccatcaagaatgtgcgcacagccacggaaagctttgcttctgaccccatcctctaccggcccgttgctgtggctctagacactaaaggacctgagatccgaactgggctcatcaagggcagcggcactgcagaggtggagctgaagaagggagccactctcaaaatcacgctggataacgcctacatggaaaagtgtgacgagaacatcctgtggctggactacaagaacatctgcaaggtggtggaagtgggcagcaagatctacgtggatgatgggcttatttctctccaggtgaagcagaaaggtgccgacttcctggtgacggaggtggaaaatggtggctccttgggcagcaagaagggtgtgaaccttcctggggctgctgtggacttgcctgctgtgtcggagaaggacatccaggatctgaagtttggggtcgagcaggatgttgatatggtgtttgcgtcattcatccgcaaggcatctgatgtccatgaagttaggaaggtcctgggagagaagggaaagaacatcaagattatcagcaaaatcgagaatcatgagggggttcggaggtttgatgaaatcctggaggccagtgatgggatcatggtggctcgtggtgatctaggcattgagattcctgcagagaaggtcttccttgctcagaagatgatgattggacggtgcaaccgagctgggaagcctgtcatctgtgctactcagatgctggagagcatgatcaagaagccccgccccactcgggctgaaggcagtgatgtggccaatgcagtcctggatggagccgactgcatcatgctgtctggagaaacagccaaaggggactatcctctggaggctgtgcgcatgcagcacctgattgcccgtgaggcagaggctgccatctaccacttgcaattatttgaggaactccgccgcctggcgcccattaccagcgaccccacagaagccaccgccgtgggtgccgtggaggcctccttcaagtgctgcagtggggccataatcgtcctcaccaagtctggcaggtctgctcaccaggtggccagataccgcccacgtgcccccatcattgctgtgacccggaatccccagacagctcgtcaggcccacctgtaccgtggcatcttccctgtgctgtgcaaggacccagtccaggaggcctgggctgaggacgtggacctccgggtgaactttgccatgaatgttggcaaggcccgaggcttcttcaagaagggagatgtggtcattgtgctgaccggatggcgccctggctccggcttcaccaacaccatgcgtgttgttcctgtgccgtgatggaccccagagcccctcctccagcccctgtcccacccccttcccccagcccatccattaggccagcaacgcttgtagaactcactctgggctgtaacgtggcactggtaggttgggacaccagggaagaagatcaacgcctcactgaaacatggctgtgtttgcagcctgctctagtgggacagcccagagcctggctgcccatcatgtggccccacccaatcaagggaagaaggaggaatgctggactggaggcccctggagccagatggcaagagggtgacagcttcctttcctgtgtgtactctgtccagttcctttagaaaaaatggatgcccagaggactcccaaccctggcttggggtcaagaaacagccagcaagagttaggggccttagggcactgggctgttgttccattgaagccgactctggccctggcccttacttgcttctctagctctctaggcctctccagtttgcacctgtccccaccctccactcagctgtcctgcagcaaacactccaccctccaccttccattttcccccactactgcagcacctccaggcctgttgctatagagcctacctgtatgtcaataaacaacagctgaagcaccaaaaaaaaaaaaaaa

SEQ ID NO: 354 - DNA, 2751 bp, Homo sapiens
  ref <308>: DATABASE ACCESSION NUMBER: NCBI / NM_002648
  ref <309>: DATABASE ENTRY DATE: 2011-12-25
  ref <313>: RELEVANT RESIDUES IN SEQ ID NO: (1)..(2751)
ccctttactcctggctgcggggcgagccgggcgtctgctgcagcggccgcggtggctgaggaggcccgagaggagtcggtggcagcggcggcggcgggaccggcagcagcagcagcagcagcagcagcagcaaccactagcctcctgccccgcggcgctgccgcacgagccccacgagccgctcaccccgccgttctcagcgctgcccgaccccgctggcgcgccctcccgccgccagtcccggcagcgccctcagttgtcctccgactcgccctcggccttccgcgccagccgcagccacagccgcaacgccacccgcagccacagccacagccacagccccaggcatagccttcggcacagccccggctccggctcctgcggcagctcctctgggcaccgtccctgcgccgacatcctggaggttgggatgctcttgtccaaaatcaactcgcttgcccacctgcgcgccgcgccctgcaacgacctgcacgccaccaagctggcgcccggcaaggagaaggagcccctggagtcgcagtaccaggtgggcccgctactgggcagcggcggcttcggctcggtctactcaggcatccgcgtctccgacaacttgccggtggccatcaaacacgtggagaaggaccggatttccgactggggagagctgcctaatggcactcgagtgcccatggaagtggtcctgctgaagaaggtgagctcgggtttctccggcgtcattaggctcctggactggttcgagaggcccgacagtttcgtcctgatcctggagaggcccgagccggtgcaagatctcttcgacttcatcacggaaaggggagccctgcaagaggagctggcccgcagcttcttctggcaggtgctggaggccgtgcggcactgccacaactgcggggtgctccaccgcgacatcaaggacgaaaacatccttatcgacctcaatcgcggcgagctcaagctcatcgacttcgggtcgggggcgctgctcaaggacaccgtctacacggacttcgatgggacccgagtgtatagccctccagagtggatccgctaccatcgctaccatggcaggtcggcggcagtctggtccctggggatcctgctgtatgatatggtgtgtggagatattcctttcgagcatgacgaagagatcatcaggggccaggttttcttcaggcagagggtctcttcagaatgtcagcatctcattagatggtgcttggccctgagaccatcagataggccaaccttcgaagaaatccagaaccatccatggatgcaagatgttctcctgccccaggaaactgctgagatccacctccacagcctgtcgccggggcccagcaaatagcagcctttctggcaggtcctcccctctcttgtcagatgcccgagggaggggaagcttctgtctccagcttcccgagtaccagtgacacgtctcgccaagcaggacagtgcttgatacaggaacaacatttacaactcattccagatcccaggcccctggaggctgcctcccaacagtggggaagagtgactctccaggggtcctaggcctcaactcctcccatagatactctcttcttctcataggtgtccagcattgctggactctgaaatatcccgggggtggggggtgggggtgggtcagaaccctgccatggaactgtttccttcatcatgagttctgctgaatgccgcgatgggtcaggtaggggggaaacaggttgggatgggataggactagcaccattttaagtccctgtcacctcttccgactctttctgagtgccttctgtggggactccggctgtgctgggagaaatacttgaacttgcctcttttacctgctgcttctccaaaaatctgcctgggttttgttccctatttttctctcctgtcctccctcaccccctccttcatatgaaaggtgccatggaagaggctacagggccaaacgctgagccacctgcccttttttctgcctcctttagtaaaactccgagtgaactggtcttcctttttggtttttacttaactgtttcaaagccaagacctcacacacacaaaaaatgcacaaacaatgcaatcaacagaaaagctgtaaatgtgtgtacagttggcatggtagtatacaaaaagattgtagtggatctaatttttaagaaattttgcctttaagttattttacctgtttttgtttcttgttttgaaagatgcgcattctaacctggaggtcaatgttatgtatttatttatttatttatttggttcccttcctattccaagcttccatagctgctgccctagttttctttcctcctttcctcctctgacttggggaccttttgggggagggctgcgacgcttgctctgtttgtggggtgacgggactcaggcgggacagtgctgcagctccctggcttctgtggggcccctcacctacttacccaggtgggtcccggctctgtgggtgatggggaggggcattgctgactgtgtatataggataattatgaaaagcagttctggatggtgtgccttccagatcctctctggggctgtgttttgagcagcaggtagcctgctggttttatctgagtgaaatactgtacaggggaataaaagagatcttatttttttttttatacttggcgttttttgaataaaaaccttttgtcttaaaaaaaaaaaaaaaaaaaaaaaaaaaaaaaaaaaaaaaaaaaa

SEQ ID NO: 355 - DNA, 1685 bp, Homo sapiens
  ref <308>: DATABASE ACCESSION NUMBER: NCBI / NM_002635
  ref <309>: DATABASE ENTRY DATE: 2011-11-27
  ref <313>: RELEVANT RESIDUES IN SEQ ID NO: (1)..(1685)
gtgtgcgtcacgccgacgacgcgcgaagggcacacatcttaggacccggaggacgtccggcctctgtgagccgcaacctttccaagggagtggttgtgtgatcgccatcttagggaaaagatgttctcgtccgtggcgcacctggcgcgggcgaaccccttcaacacgccacatctgcagctggtgcacgatggtctcggggacctccgcagcagctccccagggcccacgggccagccccgccgccctcgcaacctggcagccgccgccgtggaagagtacagttgtgaatttggctccgcgaagtattatgcactgtgtggctttggtggggtcttaagttgtggtctgacacacactgctgtggttcccctggatttagtgaaatgccgtatgcaggtggacccccaaaagtacaagggcatatttaacggattctcagttacacttaaagaggatggtgttcgtggtttggctaaaggatgggctccgactttccttggctactccatgcagggactctgcaagtttggcttttatgaagtctttaaagtcttgtatagcaatatgcttggagaggagaatacttatctctggcgcacatcactatatttggctgcctctgccagtgctgaattctttgctgacattgccctggctcctatggaagctgctaaggttcgaattcaaacccagccaggttatgccaacactttgagggatgcagctcccaaaatgtataaggaagaaggcctaaaagcattctacaagggggttgctcctctctggatgagacagataccatacaccatgatgaagttcgcctgctttgaacgtactgttgaagcactgtacaagtttgtggttcctaagccccgcagtgaatgttcaaagccagagcagctggttgtaacatttgtagcaggttacatagctggagtcttttgtgcaattgtttctcaccctgctgattctgtggtatctgtgttgaataaagaaaaaggtagcagtgcttctctggtcctcaagagacttggatttaaaggtgtatggaagggactgtttgcccgtatcatcatgattggtaccctgactgcactacagtggtttatctatgactccgtgaaggtctacttcagacttcctcgccctcctccacccgagatgccagagtctctgaagaagaagcttgggttaactcagtagttagatcaaagcaaatgtggactgaatctgcttgttgatcagtgttgaagaaagtgcaaaaggaacttttatatatttgacagtgtaggaaattgtctattcctgatataattactgtagtactcttgcttaaggcaagagtttcagatttactgttgaaataaacccaactcttcatgatttgcctgtgacttatttttaaaacttttttaaaaaagatttagctttaaaatagttggaaagaatgaagtatataagttaaggaaaaaatacaaaactgaccatgaccattgttggttgaatattccagttgctattcagaaattgtcatatgtctcaagttttatcacacaaagttcctgtatttctagggaagcagactttaaatttctaaaaacttgatttaattatagttaaatatgtgtagtcatttgtggttattttggcaagtaaatgtcagtgtatacttacaaaaaaaa

SEQ ID NO: 356 - DNA, 860 bp, Homo sapiens
  ref <308>: DATABASE ACCESSION NUMBER: NCBI / NM_002494
  ref <309>: DATABASE ENTRY DATE: 2011-11-28
  ref <313>: RELEVANT RESIDUES IN SEQ ID NO: (1)..(860)
tagatcgacctttcattccttggaaagagtctcgcacactgtgtgatcatcgtttgagcccaaagtgctaaaatacaggtgtaggtgtttgagaagcgctgtagttgattatggacgaaatgcctaatttaaggagcagaggcggagtggaaaatgaaaaaagcttcaccgcagtggagacttgttaacagccctggggagaaaggggcttaacagagtctggaaatcgtgaaagagcttgaccgatgaaatgggcctggctgtcgtatcgacagaaggctgaggccggggtgctagagaaccttgccgtgctggaattcacgttgacgcccccacggagctctgctgcagagccctcgagtcccgcacttccggccgccaggtggcgctggttctgttgccaactcggagagactgagctgggccacgcaagatggcgccgtccgccttgctgcgtcccctttcccggctgctggcccccgccaggctcccgagcggcccttcagtgcgatcaaagttctacgtgcgagagccgccgaatgccaaacctgactggctgaaagttgggttcaccttgggcaccactgtcttcttgtggatctatctcatcaaacaacacaatgaagatattttagagtacaaaagaagaaatgggctggaataaacttttgaaacactaatgtagtatgctccgtatagtgattgtagctgttcctctggattcaccatctgttgagttgtaaatgtgagagaaaaagttatatgtgaatatatatcaagccagcatttgtattttgcatcattaaataaaaagaaataaaaatacttctgtattcttcagataaagcatattgtgacaa

SEQ ID NO: 357 - DNA, 726 bp, Homo sapiens
  ref <308>: DATABASE ACCESSION NUMBER: NCBI / NM_002488
  ref <309>: DATABASE ENTRY DATE: 2011-11-28
  ref <313>: RELEVANT RESIDUES IN SEQ ID NO: (1)..(726)
gcttcctgtttttccctccgaccaaccccgagcgcaaagaaattgacctcgcagcggtcctacaatacttttatatcattggccaagctttaccccgcccctgcctcatgcagcctatgggctaggctttagggtccgcggttggtcagaccggagcacttggcctgaagacctggaattggcgacttcgatattaacaaggatggcggcggccgcagcaagtcgaggagtcggggcaaagctgggcctgcgtgagattcgcatccacttatgtcagcgctcgcccggcagccagggcgtcagggacttcattgagaaacgctacgtggagctgaagaaggcgaatcccgacctacccatcctaatccgcgaatgctccgatgtgcagcccaagctctgggcccgctacgcatttggccaagagacgaatgtccctttgaacaacttcagtgctgatcaggtaaccagagccctggagaacgttctaagtggtaaagcctgaagcctccactgaggattaagagcaacagccccagagcctgggctctgctggacttagtataatgtgaaaaaaatgtgttctcctattcctcataaagcttgtgctgtaaaatactttctcagggtgttcttgtcctcatctaccctctaccccttactgtgcaaccactgaggcaaagtagcttaatataaaaataaaactttattctgtctcatcaaaagcta

SEQ ID NO: 358 - DNA, 1305 bp, Homo sapiens
  ref <308>: DATABASE ACCESSION NUMBER: NCBI / NM_002434
  ref <309>: DATABASE ENTRY DATE: 2011-12-04
  ref <313>: RELEVANT RESIDUES IN SEQ ID NO: (1)..(1305)
actgccccccttctcccggcttccgtccccttctgcgcaggcgccgctccgccccggtcctaggggtgcttccgtggtcggcggctgctgggctccgcgccggggtccgagtcccacgaagccccggcccgagccgccggatgcccgcgcgcagcggggcccaggtcatgcagcctgggcccccatgccgtgcagctcgcacatatgtggggcagagcagccaccctgcccccagcagcagccgtccatcgtcagacgtgatcatttcctgaggcctcgagtgtgtcagggtgtttgtgcctcataacaacccacaggatggtcacccccgctttgcagatgaagaaaccaaagcagttttgccgacggatggggcaaaagaagcagcgaccagctagagcagggcagccacacagctcgtccgacgcagcccaggcacctgcagagcagccacacagctcgtccgatgcagcccaggcaccttgccccagggagcgctgcttgggaccgcccaccactccgggcccataccgcagcatctatttctcaagcccaaagggccaccttacccgactggggttggagttcttcgaccagccggcagtccccctggcccgggcatttctgggacaggtcctagtccggcgacttcctaatggcacagaactccgaggccgcatcgtggagaccgaggcatacctggggccagaggatgaagccgcccactcaaggggtggccggcagaccccccgcaaccgaggcatgttcatgaagccggggaccctgtacgtgtacatcatttacggcatgtacttctgcatgaacatctccagccagggggacggggcttgcgtcttgctgcgagcactggagcccctggaaggtctggagaccatgcgtcagcttcgcagcaccctccggaaaggcaccgccagccgtgtcctcaaggaccgcgagctctgcagtggcccctccaagctgtgccaggccctggccatcaacaagagctttgaccagagggacctggcacaggatgaagctgtatggctggagcgtggtcccctggagcccagtgagccggctgtagtggcagcagcccgggtgggcgtcggccatgcaggggagtgggcccggaaacccctccgcttctatgtccggggcagcccctgggtcagtgtggtcgacagagtggctgagcaggacacacaggcctgagcaaagggcctgcccagacaagattttttaattgtttaaaaaccgaataaatgttttatttctagaaaaaaaaaaaaaaaaaaaaaaaaa

SEQ ID NO: 359 - DNA, 561 bp, Homo sapiens
  ref <308>: DATABASE ACCESSION NUMBER: NCBI / NM_002415
  ref <309>: DATABASE ENTRY DATE: 2012-01-01
  ref <313>: RELEVANT RESIDUES IN SEQ ID NO: (1)..(561)
accacagtggtgtccgagaagtcaggcacgtagctcagcggcggccgcggcgcgtgcgtctgtgcctctgcgcgggtctcctggtccttctgccatcatgccgatgttcatcgtaaacaccaacgtgccccgcgcctccgtgccggacgggttcctctccgagctcacccagcagctggcgcaggccaccggcaagcccccccagtacatcgcggtgcacgtggtcccggaccagctcatggccttcggcggctccagcgagccgtgcgcgctctgcagcctgcacagcatcggcaagatcggcggcgcgcagaaccgctcctacagcaagctgctgtgcggcctgctggccgagcgcctgcgcatcagcccggacagggtctacatcaactattacgacatgaacgcggccaatgtgggctggaacaactccaccttcgcctaagagccgcagggacccacgctgtctgcgctggctccacccgggaacccgccgcacgctgtgttctaggcccgcccaccccaaccttctggtggggagaaataaacggtttagagact

SEQ ID NO: 360 - DNA, 5053 bp, Homo sapiens
  ref <308>: DATABASE ACCESSION NUMBER: NCBI / NM_002227
  ref <309>: DATABASE ENTRY DATE: 2011-12-18
  ref <313>: RELEVANT RESIDUES IN SEQ ID NO: (1)..(5053)
tgcagacagtgcgggcctgcgcccagtcccggctgtcctcgccgcgacccctcctcagccctgggcgcgcgcacgctggggccccgcggggctggccgcctagcgagcctgccggtcgaccccagccagcgcagcgacggggcgctgcctggcccaggcgcacacggaagtgcgcttctctgaagtagctttggaaagtagagaagaaaatccagtttgcttcttggagaacactggacagctgaataaatgcagtatctaaatataaaagaggactgcaatgccatggctttctgtgctaaaatgaggagctccaagaagactgaggtgaacctggaggcccctgagccaggggtggaagtgatcttctatctgtcggacagggagcccctccggctgggcagtggagagtacacagcagaggaactgtgcatcagggctgcacaggcatgccgtatctctcctctttgtcacaacctctttgccctgtatgacgagaacaccaagctctggtatgctccaaatcgcaccatcaccgttgatgacaagatgtccctccggctccactaccggatgaggttctatttcaccaattggcatggaaccaacgacaatgagcagtcagtgtggcgtcattctccaaagaagcagaaaaatggctacgagaaaaaaaagattccagatgcaacccctctccttgatgccagctcactggagtatctgtttgctcagggacagtatgatttggtgaaatgcctggctcctattcgagaccccaagaccgagcaggatggacatgatattgagaacgagtgtctagggatggctgtcctggccatctcacactatgccatgatgaagaagatgcagttgccagaactgcccaaggacatcagctacaagcgatatattccagaaacattgaataagtccatcagacagaggaaccttctcaccaggatgcggataaataatgttttcaaggatttcctaaaggaatttaacaacaagaccatttgtgacagcagcgtgtccacgcatgacctgaaggtgaaatacttggctaccttggaaactttgacaaaacattacggtgctgaaatatttgagacttccatgttactgatttcatcagaaaatgagatgaattggtttcattcgaatgacggtggaaacgttctctactacgaagtgatggtgactgggaatcttggaatccagtggaggcataaaccaaatgttgtttctgttgaaaaggaaaaaaataaactgaagcggaaaaaactggaaaataaacacaagaaggatgaggagaaaaacaagatccgggaagagtggaacaatttttcttacttccctgaaatcactcacattgtaataaaggagtctgtggtcagcattaacaagcaggacaacaagaaaatggaactgaagctctcttcccacgaggaggccttgtcctttgtgtccctggtagatggctacttccggctcacagcagatgcccatcattacctctgcaccgacgtggcccccccgttgatcgtccacaacatacagaatggctgtcatggtccaatctgtacagaatacgccatcaataaattgcggcaagaaggaagcgaggaggggatgtacgtgctgaggtggagctgcaccgactttgacaacatcctcatgaccgtcacctgctttgagaagtctgagcaggtgcagggtgcccagaagcagttcaagaactttcagatcgaggtgcagaagggccgctacagtctgcacggttcggaccgcagcttccccagcttgggagacctcatgagccacctcaagaagcagatcctgcgcacggataacatcagcttcatgctaaaacgctgctgccagcccaagccccgagaaatctccaacctgctggtggctactaagaaagcccaggagtggcagcccgtctaccccatgagccagctgagtttcgatcggatcctcaagaaggatctggtgcagggcgagcaccttgggagaggcacgagaacacacatctattctgggaccctgatggattacaaggatgacgaaggaacttctgaagagaagaagataaaagtgatcctcaaagtcttagaccccagccacagggatatttccctggccttcttcgaggcagccagcatgatgagacaggtctcccacaaacacatcgtgtacctctatggcgtctgtgtccgcgacgtggagaatatcatggtggaagagtttgtggaagggggtcctctggatctcttcatgcaccggaaaagcgatgtccttaccacaccatggaaattcaaagttgccaaacagctggccagtgccctgagctacttggaggataaagacctggtccatggaaatgtgtgtactaaaaacctcctcctggcccgtgagggcatcgacagtgagtgtggcccattcatcaagctcagtgaccccggcatccccattacggtgctgtctaggcaagaatgcattgaacgaatcccatggattgctcctgagtgtgttgaggactccaagaacctgagtgtggctgctgacaagtggagctttggaaccacgctctgggaaatctgctacaatggcgagatccccttgaaagacaagacgctgattgagaaagagagattctatgaaagccggtgcaggccagtgacaccatcatgtaaggagctggctgacctcatgacccgctgcatgaactatgaccccaatcagaggcctttcttccgagccatcatgagagacattaataagcttgaagagcagaatccagatattgtttcagaaaaaaaaccagcaactgaagtggaccccacacattttgaaaagcgcttcctaaagaggatccgtgacttgggagagggccactttgggaaggttgagctctgcaggtatgaccccgaaggggacaatacaggggagcaggtggctgttaaatctctgaagcctgagagtggaggtaaccacatagctgatctgaaaaaggaaatcgagatcttaaggaacctctatcatgagaacattgtgaagtacaaaggaatctgcacagaagacggaggaaatggtattaagctcatcatggaatttctgccttcgggaagccttaaggaatatcttccaaagaataagaacaaaataaacctcaaacagcagctaaaatatgccgttcagatttgtaaggggatggactatttgggttctcggcaatacgttcaccgggacttggcagcaagaaatgtccttgttgagagtgaacaccaagtgaaaattggagacttcggtttaaccaaagcaattgaaaccgataaggagtattacaccgtcaaggatgaccgggacagccctgtgttttggtatgctccagaatgtttaatgcaatctaaattttatattgcctctgacgtctggtcttttggagtcactctgcatgagctgctgacttactgtgattcagattctagtcccatggctttgttcctgaaaatgataggcccaacccatggccagatgacagtcacaagacttgtgaatacgttaaaagaaggaaaacgcctgccgtgcccacctaactgtccagatgaggtttatcaacttatgaggaaatgctgggaattccaaccatccaatcggacaagctttcagaaccttattgaaggatttgaagcacttttaaaataagaagcatgaataacatttaaattccacagattatcaagtccttctcctgcaacaaatgcccaagtcattttttaaaaatttctaatgaaagaagtttgtgttctgtccaaaaagtcactgaactcatacttcagtacatatacatgtataaggcacactgtagtgcttaatatgtgtaaggacttcctctttaaatttggtaccagtaacttagtgacacataatgacaaccaaaatatttgaaagcacttaagcactcctccttgtggaaagaatataccaccatttcatctggctagttcaccatcacaactgcattaccaaaaggggatttttgaaaacgaggagttgaccaaaataatatctgaagatgattgcttttccctgctgccagctgatctgaaatgttttgctggcacattaatcatagataaagaaagattgatggacttagccctcaaatttcagtatctatacagtactagaccatgcattcttaaaatattagataccaggtagtatatattgtttctgtacaaaaatgactgtattctctcaccagtaggacttaaactttgtttctccagtggcttagctcctgttcctttgggtgatcactagcacccatttttgagaaagctggttctacatggggggatagctgtggaatagataatttgctgcatgttaattctcaagaactaagcctgtgccagtgctttcctaagcagtatacctttaatcagaactcattcccagaacctggatgctattacacatgcttttaagaaacgtcaatgtatatccttttataactctaccactttggggcaagctattccagcactggttttgaatgctgtatgcaaccagtctgaataccacatacgctgcactgttcttagagggtttccatacttaccaccgatctacaagggttgatccctgtttttaccatcaatcatcaccctgtggtgcaacacttgaaagacccggctagaggcactatggacttcaggatccactagacagttttcagtttgcttggaggtagctgggtaatcaaaaatgtttagtcattgattcaatgtgaacgattacggtctttatgaccaagagtctgaaaatctttttgttatgctgtttagtattcgtttgatattgttacttttcacctgttgagcccaaattcaggattggttcagtggcagcaatgaagttgccatttaaatttgttcatagcctacatcaccaaggtctctgtgtcaaacctgtggccactctatatgcactttgtttactctttatacaaataaatatactaaagactttacatgca

SEQ ID NO: 361 - DNA, 1450 bp, Homo sapiens
  ref <308>: DATABASE ACCESSION NUMBER: NCBI / NM_001536
  ref <309>: DATABASE ENTRY DATE: 2011-12-25
  ref <313>: RELEVANT RESIDUES IN SEQ ID NO: (1)..(1450)
attgccaatgaaatcttccagcggggtcgcggtaggcgggccgtggaccctctggtataaggcggtcccgggggagtgaggagaaagggggggtcttggcggccggaggaggagtaggtgcgggtgaagatggcggcagccgaggccgcgaactgcatcatggagaattttgtagccaccttggctaatgggatgagcctccagccgcctcttgaagaagtgtcctgtggccaggcggaaagcagtgagaagcccaacgctgaggacatgacatccaaagattactactttgactcctacgcacactttggcatccacgaggagatgctgaaggacgaggtgcgcaccctcacttaccgcaactccatgtttcataaccggcacctcttcaaggacaaggtggtgctggacgtcggctcgggcaccggcatcctctgcatgtttgctgccaaggccggggcccgcaaggtcatcgggatcgagtgttccagtatctctgattatgcggtgaagatcgtcaaagccaacaagttagaccacgtggtgaccatcatcaaggggaaggtggaggaggtggagctcccagtggagaaggtggacatcatcatcagcgagtggatgggctactgcctcttctacgagtccatgctcaacaccgtgctctatgcccgggacaagtggctggcgcccgatggcctcatcttcccagaccgggccacgctgtatgtgacggccatcgaggaccggcagtacaaagactacaagatccactggtgggagaacgtgtatggcttcgacatgtcttgcatcaaagatgtggccattaaggagcccctagtggatgtcgtggaccccaaacagctggtcaccaacgcctgcctcataaaggaggtggacatctataccgtcaaggtggaagacctgaccttcacctccccgttctgcctgcaagtgaagcggaatgactacgtgcacgccctggtggcctacttcaacatcgagttcacacgctgccacaagaggaccggcttctccaccagccccgagtccccgtacacgcactggaagcagacggtgttctacatggaggactacctgaccgtgaagacgggcgaggagatcttcggcaccatcggcatgcggcccaacgccaagaacaaccgggacctggacttcaccatcgacctggacttcaagggccagctgtgcgagctgtcctgctccaccgactaccggatgcgctgaggcccggctctcccgccctgcacgagcccaggggctgagcgttcctaggcggtttcggggctcccccttcctctccctccctcccgcagaagggggttttaggggcctgggctggggggatggggagggcacatcgtgactgtgtttttcataacttatgtttttatatggttgcatttacgccaataaatcctcagctggggtc

SEQ ID NO: 362 - DNA, 2196 bp, Homo sapiens
  ref <308>: DATABASE ACCESSION NUMBER: NCBI / NM_000183
  ref <309>: DATABASE ENTRY DATE: 2011-11-21
  ref <313>: RELEVANT RESIDUES IN SEQ ID NO: (1)..(2196)
tcgctcctggctaacatggccgaaaggtcgtattctccgggggaggacgggggcccggagaggagggggtggagtgcctggttttccagtcaggcggccggagggcagccctcaagaacggccctgaccgcccgcggggtgaggggccctttctgggcaggacccgccccttggtcccgcagagccttggtacttggacctgaaccttgctccgagagggagtcctcgcggacgtcagccaagattccagaatgactatcttgacttacccctttaaaaatcttcccactgcatcaaaatgggccctcagattttccataagacctctgagctgttcctcccagctacgagctgccccagctgtccagaccaaaacgaagaagacgttagccaaacccaatataaggaatgttgtggtggtggatggtgttcgcactccatttttgctgtctggcacttcatataaagacctgatgccacatgatttggctagagcagcgcttacgggtttgttgcatcggaccagtgtccctaaggaagtagttgattatatcatctttggtacagttattcaggaagtgaaaacaagcaatgtggctagagaggctgcccttggagctggcttctctgacaagactcctgctcacactgtcaccatggcttgtatctctgccaaccaagccatgaccacaggtgttggcttgattgcttctggccagtgtgatgtgatcgtggcaggtggtgttgagttgatgtccgatgtccctattcgtcactcaaggaaaatgagaaaactgatgcttgatctcaataaggccaaatctatgggccagcgactgtctttaatctctaaattccgatttaatttcctagcacctgagctccctgcggtttctgagttctccaccagtgagaccatgggccactctgcagaccgactggccgctgcctttgctgtttctcggctggaacaggatgaatatgcactgcgctctcacagtctagccaagaaggcacaggatgaaggactcctttctgatgtggtacccttcaaagtaccaggaaaagatacagttaccaaagataatggcatccgtccttcctcactggagcagatggccaaactaaaacctgcattcatcaagccctacggcacagtgacagctgcaaattcttctttcttgactgatggtgcatctgcaatgttaatcatggcggaggaaaaggctctggccatgggttataagccgaaggcatatttgagggattttatgtatgtgtctcaggatccaaaagatcaactattacttggaccaacatatgctactccaaaagttctagaaaaggcaggattgaccatgaatgatattgatgcttttgaatttcatgaagctttctcgggtcagattttggcaaattttaaagccatggattctgattggtttgcagaaaactacatgggtagaaaaaccaaggttggattgcctcctttggagaagtttaataactggggtggatctctgtccctgggacacccatttggagccactggctgcaggttggtcatggctgctgccaacagattacggaaagaaggaggccagtatggcttagtggctgcgtgtgcagctggagggcagggccatgctatgatagtggaagcttatccaaaataatagatccagaagaagtgacctgaagtttctgtgcaacactcacactaggcaatgccatttcaatgcattactaaatgacatttgtagttcctagctcctcttaggaaaacagttcttgtggccttctattaaatagtttgcacttaagccttgccagtgttctgagcttttcaataatcagtttactgctctttcagggatttctaagccaccagaatctcacatgagatgtgtgggtggttgtttttggtctctgttgtcactaaagactaaatgagggtttgcagttgggaaagaggtcaactgagatttggaaatcatctttgtaatatttgcaaattatacttgttcttatctgtgtcctaaagatgtgttctctataaaatacaaaccaacgtgcctaattaattatggaaaaataattcagaatctaaacaccactgaaaacttataaaaaatgtttagatacataaatatggtggtcagcgttaataaagtggagaaatattggaaaaaaaaa

SEQ ID NO: 363 - DNA, 942 bp, Homo sapiens
  ref <308>: DATABASE ACCESSION NUMBER: NCBI / NM_002085
  ref <309>: DATABASE ENTRY DATE: 2011-11-21
  ref <313>: RELEVANT RESIDUES IN SEQ ID NO: (1)..(942)
gagcgctctggagggcgtggccgtgggaaaggaggcgcggaaagccgacgcgcgtccattggtcggctggacgaggggaggagccgctggctcccagccccgccgcgatgagcctcggccgcctttgccgcctactgaagccggcgctgctctgtggggctctggccgcgcctggcctggccgggaccatgtgcgcgtcccgggacgactggcgctgtgcgcgctccatgcacgagttttccgccaaggacatcgacgggcacatggttaacctggacaagtaccggggcttcgtgtgcatcgtcaccaacgtggcctcccagtgaggcaagaccgaagtaaactacactcagctcgtcgacctgcacgcccgatacgctgagtgtggtttgcggatcctggccttcccgtgtaaccagttcgggaagcaggagccagggagtaacgaagagatcaaagagttcgccgcgggctacaacgtcaaattcgatatgttcagcaagatctgcgtgaacggggacgacgcccacccgctgtggaagtggatgaagatccaacccaagggcaagggcatcctgggaaatgccatcaagtggaacttcaccaagttcctcatcgacaagaacggctgcgtggtgaagcgctacggacccatggaggagcccctggtgatagagaaggacctgccccactatttctagctccacaagtgtgtggccccgcccgagcccctgcccacgcccttggagccttccaccggcactcatgacggcctgcctgcaaacctgctggtggggcagacccgaaaatccagcgtgcaccccgccggaggaaggtcccatggcctgctgggcttggctcggcgcccccacccctggctaccttgtgggaataaacagacaaattagcctgctggaaaaaaaaaaaaaaaaaaaaaaaaaa

SEQ ID NO: 364 - DNA, 2439 bp, Homo sapiens
  ref <308>: DATABASE ACCESSION NUMBER: NCBI / NM_001502
  ref <309>: DATABASE ENTRY DATE: 2011-11-13
  ref <313>: RELEVANT RESIDUES IN SEQ ID NO: (1)..(2439)
attcccatggctggccagaggaggaacgctttgtgttctcatcggagctgcatgggaagtctgcatacagcaaagtgacctgcatgcctcaccttatggaaaggatggtgggctctggcctcctgtggctggccttggtctcctgcattctgacccaggcatctgcagtgcagcgaggttatggaaaccccattgaagccagttcgtatgggctggacctggactgcggagctcctggcaccccagaggctcatgtctgttttgacccctgtcagaattacaccctcctggatgaacccttccgaagcacagagaactcagcagggtcccaggggtgcgataaaaacatgagcggctggtaccgctttgtaggggaaggaggagtaaggatgtcggagacctgtgtccaggtgcaccgatgccagacagacgctcccatgtggctgaatgggacccaccctgcccttggggatggcatcaccaaccacactgcctgtgcccattggagtggcaactgctgtttctggaaaacagaggtgctggtgaaggcctgcccaggcgggtaccatgtgtaccggttggaaggcactccctggtgtaatctgagatactgcacagacccatccactgtggaggacaagtgtgagaaggcctgccgccccgaggaggagtgccttgccctcaacagcacctggggctgtttctgcagacaggacctcaatagttctgatgtccacagtttgcagcctcagctagactgtgggcccagggagatcaaggtgaaggtggacaaatgtttgctgggaggcctgggtttgggggaggaggtcattgcctacctgcgagacccaaactgcagcagcatcttgcagacagaggagaggaactgggtatctgtgaccagccccgtccaggctagtgcctgcaggaacattctggagagaaatcaaacccatgccatctacaaaaacaccctctccttggtcaatgatttcatcatcagagacaccatcctcaacatcaacttccaatgtgcctacccactggacatgaaagtcagcctccaagctgccttgcagcccattgtaagttccctgaacgtcagtgtggacgggaatggagagttcattgtcaggatggccctcttccaagaccagaactacacgaatccttacgaaggggatgcagttgaactgtctgttgagtccgtgctgtatgtgggtgccatcttggaacaaggggacacctcccggtttaacctggtgttgaggaactgctatgccacccccactgaagacaaggctgaccttgtgaagtatttcatcatcagaaacagctgctcaaatcaacgtgattccaccatccacgtggaggagaatgggcagtcctcggaaagccggttctcagttcagatgttcatgtttgctggacattatgacctagttttcctgcattgtgagattcatctctgtgattctcttaatgaacagtgccagccttcttgctcaagaagtcaagtccgcagtgaagtaccggccatcgacctagcccgggttctagatttggggcccatcactcggagaggtgcacagtctcccggtgtcatgaatggaacccctagcactgcagggttcctggtggcctggcctatggtcctcctgactgtcctcctggcttggctgttctgagagctccgctgagcatctggccttgaagtttgtgttcttccctctggcaatggctcccttcagcacttctgctttccactccaattcacacaggcttggtattaacagaatcaaggccaggctaggttaggaaaagggaagagctttcaccttctttaaaactctcggctgggcgcagtggctcatgcctgtaatcccagcattttgggaggctgaggcaggtggatcacctgaggtcagcagttcaaaatcagcctggccaaaatgctgaaactccgtctctactaaaaatacaaaaattagccaggcatggtggcaggcgcctgtaatcccagctactcgggaggccaaggcaggagaattgctcgaactcagggggtggaggttgcagtgagttgagattgtgccattgcactccagcctgggcaacagagcaagactctgtctcaggaaaaaaaaaaaaaaaaaagaaaagcaacatagtggggtttctgtcaatctgtcctcggctgcccttctcatttgttgatgggaccttgaaagcaagcttgctaggtgccctctgtggctccagcctttaccggaagtgtggtgcatgtttttaacttcagggaagcggtatcctgtcactggggtatgggatgagcatggagaagaggcaccagccacgattccttcctaagcatctcctgttctgactgctcatgaattgaagaaactgacccttgtgttcaaaaaaaaaaaaaaaaaa

SEQ ID NO: 365 - DNA, 2473 bp, Homo sapiens
  ref <308>: DATABASE ACCESSION NUMBER: NCBI / NM_002080
  ref <309>: DATABASE ENTRY DATE: 2011-11-19
  ref <313>: RELEVANT RESIDUES IN SEQ ID NO: (1)..(2473)
tctggcccagggaagtccctgtccttaccttcagcaggagccggttccctgtgtgtgtgtccgctcgccctctgctccgtcctgcggctgcccactgccctcctacggtccaccatggccctgctgcactccggccgcgtcctccccgggatcgccgccgccttccacccgggcctcgccgccgcggcctctgccagagccagctcctggtggacccatgtggaaatgggacctccagatcccattctgggagtcactgaagcctttaagagggacaccaatagcaaaaagatgaatctgggagttggtgcctaccgggatgataatggaaagccttacgttctgcctagcgtccgcaaggcagaggcccagattgccgcaaaaaatttggacaaggaatacctgcccattgggggactggctgaattttgcaaggcatctgcagaactagccctgggtgagaacagcgaagtcttgaagagtggccggtttgtcactgtgcagaccatttctggaactggagccttaaggatcggagccagttttctgcaaagattttttaagttcagccgagatgtctttctgcccaaaccaacctggggaaaccacacacccatcttcagggatgctggcatgcagctacaaggttatcggtattatgaccccaagacttgcggttttgacttcacaggcgctgtggaggatatttcaaaaataccagagcagagtgttcttcttctgcatgcctgcgcccacaatcccacgggagtggacccgcgtccggaacagtggaaggaaatagcaacagtggtgaagaaaaggaatctctttgcgttctttgacatggcctaccaaggctttgccagtggtgatggtgataaggatgcctgggctgtgcgccacttcatcgaacagggcattaatgtttgcctctgccaatcatatgccaagaacatgggcttatatggtgagcgtgtaggagccttcactatggtctgcaaagatgcggatgaagccaaaagggtagagtcacagttgaagatcttgatccgtcccatgtattccaaccctcccctcaatggggcccggattgctgctgccattctgaacaccccagatttgcgaaaacaatggctgcaagaagtgaaagtcatggctgaccgcatcattggcatgcggactcaactggtctccaacctcaagaaggagggttccacccacaattggcaacacatcaccgaccaaattggcatgttctgtttcacagggctaaagcctgaacaggtggagcggctgatcaaggagttctccatctacatgacaaaagatggccgcatctctgtggcaggggtcacctccagcaacgtgggctaccttgcccatgccattcaccaggtcaccaagtaatgtccctggtgcgaggaaacagagacaacctttctgtcttcagcctctgctattgagagcttcacacagacaatgagagagggtggatggtggtgagtggatcatttctttcagccacagtgtgtaacactcagcatttgaatgtttctcagaaaagaacatgtagtgacacagggcagaggcatccatggctggcgtctggaatattaaaccaaactctccccggtccttttttctccaacttttctcaaagagtttacatgtgcaagaaagtcatcgcaccaaaaaacctgtcaattatgccattgcaatatttcagaagctttaactgaagtgtcaggttcctcgtgagaaacagcacacgttagaggctttgagagaaggcctagttctgtcatgagtagtcggcctcgtgtctgtcctcccatcttggaacaaccttatcaacaggccgcactgcagaaatgatgttttatgaaaaccaatgaggctgctgccactccagcaagggaaataatgcagtttcctgtcttatttaagaaaaagagaaggctctcttttctcccttgtcattgccgttcttttccttacacgcaaagattttttaactattgcagattttcatcccattctactgcttgattgaccatcaactccatcctatcgagatttatttaagaatgaagaacataattttctgctgatgctgtaccctcacccttttcagcaaagaatagtggagagtaggaaactgtactttatctcggcatcctcttgaatgatagtgcaagtttctccagttgggatgttgtctctgcccggttggacctcctccctttgttgaatgtggtgtgcagcctctcatctcacactgtgagtccagcggcgcagggtggtaccaggaaagaggatattctaggctttgcgtgctgctagctgggttcaggcttcacccactggaaagaaccaccatctgctctaaccatgtagacttattgcggcctggtttctctgttacaataaaattactgtagacccaaaaaaaaaaaaaaaaaaaaaaaaaaaa

SEQ ID NO: 366 - DNA, 6172 bp, Homo sapiens
  ref <308>: DATABASE ACCESSION NUMBER: NCBI / NM_001440
  ref <309>: DATABASE ENTRY DATE: 2011-11-20
  ref <313>: RELEVANT RESIDUES IN SEQ ID NO: (1)..(6172)
ggcgggtccctgagctggaagccggagagcaagccctggaggttcactctttcaagaagtcgtgtgctgaggtgtaatgctacacaagtcagaggaaggaagggtcctgaaacacatggcctgattgttggcaaaggcatcataagaagctggcatttatttctgttctaacctattactgtataactgtgaatagacactatgcatatttgttggtcagcaaaaccaagaaacaagagctatggcatttgaaaaagtctgtctgattccagggtgtttttcctgggtttcatcatcaggtacctcctccctttcatctcagcaagaatgtggcaccttttatcgtttgataaagattaaggacatgttctttggtcaacagccagaacttaaaatctgctggaatagggtcagagaccatttcagctgcagctgaggaaaatgaaatgttcattttatttggtgccttgtctggggagcacactaactcttctggaaacgtgtcagtgaaacagagatcgttttgtggaatagcaacccatggttatggcgagtgacccgacgtgatctggggggcaggctgcagaggactcatgacaggctataccatgctgcggaatgggggcgcggggaacggaggtcagacctgcatgctgcgctggtccaaccgcatccgcctcacgtggctcagcttcacgctctttgtcatcctggtcttcttcccgctcatcgcccactattacctcaccactctggatgaggctgatgaggcaggcaagcggatttttggtccccgggtggggaacgagctgtgcgaggtgaagcacgtgctggatctgtgccgcatccgggagtcggtgagtgaagagctcctgcagctggaggccaagcgccaagagctgaacagcgagatcgccaagctgaatctgaagatcgaagcctgtaagaagagcattgagaacgccaagcaggacctgctccagctcaagaatgtcatcagccagaccgagcattcctacaaggagctcatggcccagaaccagcccaagctgtccctgcccatccgactgctcccagagaaggacgatgccggcctccctcccccgaaggccactcggggctgccggctacacaactgctttgattattctcgttgccctctcacctctggcttcccggtctacgtctatgacagtgaccagtttgtctttggcagctacctggatcccttggtcaagcaggcttttcaggcgacagcacgagctaacgtttatgttacagaaaatgcagacatcgcctgcctttacgtgatactagtgggagagatgcaggagcccgtggtgctgcggcctgctgagctggagaagcagttgtattccctgccacactggcggacggatggacacaaccatgtcatcatcaatctgtcacgtaagtcagatacacagaaccttctctataacgtcagtactggccgtgccatggtggcccagtccaccttctacactgtccagtacagacctggctttgacttggtcgtatcaccgctggtccatgccatgtctgagcccaacttcatggaaatcccaccacaggtgccggtgaagcggaaatatctcttcaccttccagggcgagaagattgagtctctgaggtctagccttcaggaggcccgctccttcgaagaggaaatggagggcgaccctcccgccgactacgatgaccggatcattgccaccctgaaggcggtgcaggacagcaagctggatcaggtcctggtggaattcacctgcaaaaaccagcccaaacccagcctgccgactgagtgggcactgtgtggagagcgggaggaccgcttggaattgctgaagctctccaccttcgccctcatcattacccccggggaccctcgcttggttatttcctctgggtgtgcaacacggctcttcgaagccctggaagtcggtgccgtcccggtggtgctgggggagcaggtccagcttccctaccaggacatgctgcagtggaacgaggcggccctggtggtgccaaagcctcgtgttaccgaggttcatttcctgctcagaagcctctccgatagtgacctcctggctatgaggcggcaaggccgctttctctgggagacttacttctccactgctgacagtatttttaataccgtgctggctatgattaggactcgcatccagatcccagccgctcccatccgggaagaggcggcagctgagatcccccaccgttcaggcaaggcggctggaactgaccccaacatggctgacaacggggacctggacctggggccagtggagacggagccgccctacgcctcacccagatacctccgcaatttcactctgactgtcactgacttttaccgcagctggaactgtgctccagggcctttccatcttttcccccacactccctttgaccctgtgttgccctcagaggccaaattcttgggctcagggactggctttcggcctattggtggtggagctgggggttctggcaaggaatttcaggcagcgcttggaggcaatgttccccgagagcagttcacggtggtgatgttgacttatgagcgggaggaagtgcttatgaactctttagagaggctgaatggcctcccttacctgaacaaggtcgtggtggtgtggaattctcccaagctgccatcagaggaccttctgtggcctgacattggcgttcccatcatggtggtccgtactgagaagaacagtttgaacaaccgattcttaccctggaatgaaattgagacagaggccatcctgtccattgatgacgatgctcacctccgccatgacgaaatcatgtttgggttccgggtgtggagagaagctcgggaccgcatcgtgggcttccctggccgttaccacgcatgggacatcccccatcagtcctggctctacaactccaactactcctgtgagctgtccatggtgctgacaggtgctgccttctttcacaagtattatgcctacctgtattcttatgtgatgccccaggccatccgggacatggtggatgaatacatcaactgtgaggacattgccatgaacttccttgtctcccacatcactcggaagccccccatcaaggtgacctcacggtggacattccgatgcccaggatgccctcaggccctgtctcatgatgactcccacttccacgagcggcacaagtgcatcaacttcttcgtgaaggtgtacggctacatgcccctcctgtacacgcagttcagggtggattctgtgctcttcaagacacgcctgccccatgacaagaccaagtgcttcaagttcatctaggggcagcgcacggtctggggaagaggatgagcagagggaggaagatggctcccaaggttcctaggcattgcaggaccttgggcacatctgctggtgggtggcccagagcctctgctggaaggggcagcaggaggagtggaaggaaaccgctgcctttatcttgaagtcagccacactgggcctggagccctgggcggagtccccggggttccccacacagggcactgactgatagcttacactgaggactgtggcgactctgcagagtcactcacaccgttcgtacgcccaggacagctggttcgtggtttttacattcaataacaactattatgattatttaaaaagagaaagtttcagatttgccattcaaggcttatttatatatatgtgtgtgtatataaatacatgcacacacttgcatacatatatatttttggctgggggagtgtgagttttgcctttctaagggagggaccgcgcaggctcctttgttctgtattctggcggagatgggtcctggccttgtgtcactggcttatccttaaagatcatctcccatcctccccagcgccatctgtgtgcagcaaccagaaagggatgaacttggccctcttgcgggcctggacaaggtctcttccttaccctttctgttgccagtcagcaacctgtaactcacattctcttcccagtgaatccctgggagcgcctgaccctggtgggctgttcagcttcctgctgctggggccagcgatttttgaggatttatctttaggccaggcttgcctccgtacttatccctgctctcccatttctctcttgtttgagagagaatgaggaagcaaagagtgagaaagaataggggctgaagacgccactcccagatggctctttctatcctgctcttctgttgaaacacacgtgctgtgggcctcaggcgtttctgaagtgctctttcttggattggacaggagatcagcagcgtgcacatctgctgtggtctgaagtggtttgcaggtcagcctcctctccctagtgtagagcaagccagtgtccttcgaggaacccacccggctggccgggaagttttacagcaaggcgcctgccttgggataattccttggtgaaattcaccttccccccgcctctgtctggagccccatcctgtgttatctgtggtttttggacccctaatgtcagcttggctgtaggactccccgaggtttggtatgtgctagaacaatgggaggctgtgatttgctgtgtaagctcacatccagccttggaatctaacgggcattcacaacccgagttaccactttccactccctgcttaggattctgttccctgggctgaaactgaaataagctaattttttgggtcacggtggcagtaggggaacctaggagggtgtgagtggcatttgtcagggatttagcccatgacgtgtttcttgaaccctactttctggaagtggagttgactctggaagttttctagcaactgaacaaaagctcaggtttgtcctggtcatgcacatgccttaagccagttccgtcttccctagaccttggcatcctgtgcttctatttcttggaatacgttctcctctgacctgcctgtaccacgtgggtcctcttcaagtactgttttgaagctgggctcttttgtgtagctcccacccacctgtagggctagctcggcttaagggaactctccccattggcaaaccggacccggccgccgccaggactgtgtttccaaaggttccccgcccccaaccccagcatcagcctgtagctcccctgctgaggcagtgtggttatgttcccagcagtgggggtcagacgcccttcctcagaactttctagttgccctctacctgactcctgacttgtattccttttagcagtagccttcttccctcggggagccaaagagtgtggtgtgtggcgctatattgtggctgctatttcatctggtttcttttaatgtgaggaactcacatactgacttcagtgggactcggtgagccggggccgtctgtgtggtgggaccccctttagcgggactcagtgagctggggccgtctgtgtggtggagccagggcctctccctttagtggagccaggttgtcgggccccgaatgtcactggtggatctaagaagggctgagtggtctgacaccaaaacatgccgcagggagggctgtggtgccggtgcttccaacaaggacagccctccttgaccctgaaaggaacactggcttgaaggactgcagacaggctctgaggggcacgccctcctcagcgagaggcagcaaggtggccacagtgtcactggtcaggtgcttctcaccacgggaaagccgccgacctgtgactcgcttgagatgggaaagcggcgccacagaccccgggtctccttggctgtctgtgggccgcccctggccaccttgtcctggctcgcagggtgcaggagcgcctcgttctctgggtggccggcttgctgctccggtttgggctgtcttaccataacaccgtcccagggctctgcaggccactgtgagcgctggctccctgggcagtgctcctccgtgtggactgtgcctcaggccagggctcaccagctggggtcctgtccggaaggatgggatctttctgggagctgcgccggacagagtggggagctcctagtttgtggggggaagctttgatatccatgccacgtccatccaccccaccccttttcgtcacgagcacaatggtcttacattggatttttgtaaaaaaataaaaataaatggagactttaactc

SEQ ID NO: 367 - DNA, 1274 bp, Homo sapiens
  ref <308>: DATABASE ACCESSION NUMBER: NCBI / NM_003754
  ref <309>: DATABASE ENTRY DATE: 2011-11-21
  ref <313>: RELEVANT RESIDUES IN SEQ ID NO: (1)..(1274)
atttccgcttccgcctccttctttctcgacaagatggccacaccggcggtaccagtaagtgctcctccggccacgccaaccccagtcccggcggcggccccagcctcagttccagcgccaacgccagcaccggctgcggctccggttcccgctgcggctccagcctcatcctcagaccctgcggcagcagcggctgcaactgcggctcctggccagaccccggcctcagcgcaagctccagcgcagaccccagcgcccgctctgcctggtcctgctcttccagggcccttccccggcggccgcgtggtcaggctgcacccagtcattttggcctccattgtggacagctacgagagacgcaacgagggtgctgcccgagttatcgggaccctgttgggaactgtcgacaaacactcagtggaggtcaccaattgcttttcagtgccgcacaatgagtcagaagatgaagtggctgttgacatggaatttgctaagaatatgtatgaactgcataaaaaagtttctccaaatgagctcatcctgggctggtacgctacgggccatgacatcacagagcactctgtgctgatccacgagtactacagccgagaggcccccaaccccatccacctcactgtggacacaagtctccagaacggccgcatgagcatcaaagcctacgtcagcactttaatgggagtccctgggaggaccatgggagtgatgttcacgcctctgacagtgaaatacgcgtactacgacactgaacgcatcggagttgacctgatcatgaagacctgctttagccccaacagagtgattggactctcaagtgacttgcagcaagtaggaggggcatcagctcgcatccaggatgccctgagtacagtgttgcaatatgcagaggatgtactgtctggaaaggtgtcagctgacaatactgtgggccgcttcctgatgagcctggttaaccaagtaccgaaaatagttcccgatgactttgagaccatgctcaacagcaacatcaatgaccttttgatggtgacctacctggccaacctcacacagtcacagattgcactcaatgaaaaacttgtaaacctgtgaatggaccccaagcagtacacttgctggtctaggtattaaccccaggactcagaagtgaaggagaaatgggttttttgtggtcttgagtcacactgagatagtcagttgtgtgtgactctaataaacggagcctaccttttgtaaattaaaaaaaaaaaaaaaaaaaa

SEQ ID NO: 368 - DNA, 1127 bp, Homo sapiens
  ref <308>: DATABASE ACCESSION NUMBER: NCBI / NM_003755
  ref <309>: DATABASE ENTRY DATE: 2011-04-09
  ref <313>: RELEVANT RESIDUES IN SEQ ID NO: (1)..(1127)
gtctcgttttcgcccgcttccgctctctggccgggcttgggctgcgtggagaatactttttgcgatgcctactggagactttgattcgaagcccagttgggccgaccaggtggaggaggagggggaggacgacaaatgtgtcaccagcgagctcctcaaggggatccctctggccacaggtgacaccagcccagagccagagctactgccgggagctccactgccgcctcccaaggaggtcatcaacggaaacataaagacagtgacagagtacaagatagatgaggatggcaagaagttcaagattgtccgcaccttcaggattgagacccggaaggcttcaaaggctgtcgcaaggaggaagaactggaagaagttcgggaactcagagtttgacccccccggacccaatgtggccaccaccactgtcagtgacgatgtctctatgacgttcatcaccagcaaagaggacctgaactgccaggaggaggaggaccctatgaacaaactcaagggccagaagatcgtgtcctgccgcatctgcaagggcgaccactggaccacccgctgcccctacaaggatacgctggggcccatgcagaaggagctggccgagcagctgggcctgtctactggcgagaaggagaagctgccgggagagctagagccggtgcaggccacgcagaacaagacagggaagtatgtgccgccgagcctgcgcgacggggccagccgccgcggggagtccatgcagcccaaccgcagagccgacgacaacgccaccatccgtgtcaccaacttgtcagaggacacgcgtgagaccgacctgcaggagctcttccggcctttcggctccatctcccgcatctacctggctaaggacaagaccactggccaatccaagggctttgccttcatcagcttccaccgccgcgaggatgctgcgcgtgccattgccggggtgtccggctttggctacgaccacctcatcctcaacgtcgagtgggccaagccgtccaccaactaagccagctgccactgtgtactcggtccgggacccttggcgacagaagacagcctccgagagcgcgggctccaagggcaataaagcagctccactctctcta

SEQ ID NO: 369 - DNA, 1458 bp, Homo sapiens
  ref <308>: DATABASE ACCESSION NUMBER: NCBI / NM_003757
  ref <309>: DATABASE ENTRY DATE: 2011-12-04
  ref <313>: RELEVANT RESIDUES IN SEQ ID NO: (1)..(1458)
ataatccggaagtgacctcgaaaccttttccggtcttactcacgttgcggccttcctcgcgtcacagccgggatgaagccgatcctactgcagggccatgagcggtccattacgcagattaagtataaccgcgaaggagacctcctctttactgtggccaaggaccctatcgtcaatgtatggtactctgtgaatggtgagaggctgggcacctacatgggccataccggagctgtgtggtgtgtggacgctgactgggacaccaagcatgtcctcactggctcagctgacaacagctgtcgtctctgggactgtgaaacaggaaagcagctggcccttctcaagaccaattcggctgtccggacctgcggttttgactttgggggcaacatcatcatgttctccacggacaagcagatgggctaccagtgctttgtgagcttttttgacctgcgggatccgagccagattgacaacaatgagccctacatgaagatcccttgcaatgactctaaaatcaccagtgctgtttggggacccctgggggagtgcatcatcgctggccatgagagtggagagctcaaccagtatagtgccaagtctggagaggtgttggtgaatgttaaggagcactcccggcagatcaacgacatccagttatccagggacatgaccatgtttgtgaccgcgtccaaggacaacacagccaagctttttgactccacaactcttgaacatcagaagactttccggacagaacgtcctgtcaactcagctgccctctcccccaactatgaccatgtggtcctgggcggtggtcaggaagccatggatgtaaccacaacctccaccaggattggcaagtttgaggccaggttcttccatttggcctttgaagaagagtttggaagagtcaagggtcactttggacctatcaacagtgttgccttccatcctgatggcaagagctacagcagcggcggcgaagatggttacgtccgtatccattacttcgacccacagtacttcgaatttgagtttgaggcttaagaagctggatctcctgccgggcgtggtggctcatgcctgtaatcccaccactttttttttaaggcaggcggatcacctgaggtcaggagtttaagaccagcctgaccaacatggagaaacctcgtctctactaaaaatacaaaaattagccaggcatggtggcacacgcctatagtcccagctactcaggaggctgaggcaggagaatcacttgaacccaggaggcagaggttgcagtgagctgagatcacgtcattgcactccatcctgagccacaagagcaaaactccgtctcaaaaaaaaaaaagaagaaggtggatctccaaccaggccagagaagattctcacagaaggttttgaactctaagaaataaattggtttggtaataaatggcttctggtcagata

SEQ ID NO: 370 - DNA, 2665 bp, Homo sapiens
  ref <308>: DATABASE ACCESSION NUMBER: NCBI / NM_001360
  ref <309>: DATABASE ENTRY DATE: 2011-11-21
  ref <313>: RELEVANT RESIDUES IN SEQ ID NO: (1)..(2556)
aatcgctgacatcatccgggggcgggcgcccctgccctgcgggtgactccgacccctggctagagggtaggcggcgtggagcagcgcgcgcaagcgaggccaggggaaggtgggcgcaggtgaggggccgaggtgtgcgcaggactttagccggttgagaaggatcaagcaggcatttggagcacaggtgtctagaaacttttaaggggccggttcaagaaggaaaagttcccttctgctgtgaaactatttggcaagaggctggagggcccaatggctgcaaaatcgcaacccaacattcccaaagccaagagtctagatggcgtcaccaatgacagaaccgcatctcaagggcagtggggccgtgcctgggaggtggactggttttcactggcgagcgtcatcttcctactgctgttcgcccccttcatcgtctactacttcatcatggcttgtgaccagtacagctgcgccctgactggccctgtggtggacatcgtcaccggacatgctcggctctcggacatctgggccaagactccacctataacgaggaaagccgcccagctctataccttgtgggtcaccttccaggtgcttctgtacacgtctctccctgacttctgccataagtttctacccggctacgtaggaggcatccaggagggggccgtgactcctgcaggggttgtgaacaagtatcagatcaatggcctgcaagcctggctcctcacgcacctgctctggtttgcaaacgctcatctcctgtcctggttctcgcccaccatcatcttcgacaactggatcccactgctgtggtgcgccaacatccttggctatgccgtctccaccttcgccatggtcaagggctacttcttccccaccagcgccagagactgcaaattcacaggcaatttcttttacaactacatgatgggcatcgagtttaaccctcggatcgggaagtggtttgacttcaagctgttcttcaatgggcgccccgggatcgtcgcctggaccctcatcaacctgtccttcgcagcgaagcagcgggagctccacagccatgtgaccaatgccatggtcctggtcaacgtcctgcaggccatctacgtgattgacttcttctggaacgaaacctggtacctgaagaccattgacatctgccatgaccacttcgggtggtacctgggctggggcgactgtgtctggctgccttatctttacacgctgcagggtctgtacttggtgtaccaccccgtgcagctgtccaccccgcacgccgtgggcgtcctgctgctgggcctggtgggctactacatcttccgggtggccaaccaccagaaggacctgttccgccgcacggatgggcgctgcctcatctggggcaggaagcccaaggtcatcgagtgctcctacacatccgccgatgggcagaggcaccacagcaagctgctggtgtcgggcttctggggcgtggcccgccacttcaactacgtcggcgacctgatgggcagcctggcctactgcctggcctgtggcggcggccacctgctgccctacttctacatcatctacatggccatcctgctgacccaccgctgcctccgggacgagcaccgctgcgccagcaagtacggccgggactgggagcgctacaccgccgcagtgccttaccgcctgctgcctggaatcttctaagggcacgccctagggagaagccctgtggggctgtcaagagcgtgttctgccaggtccatgggggctggcatcccagctccaactcgaggagcctcagtttcctcatctgtaaactggagagagcccagcacttggcaggtgtccagtacctaatcacgctctgttccttgcttttgccttcaagggaattccgagtgtccagcactgccgtattgccagcacagacggattttctctaatcagtgtccctggggcaggaggatgacccagtcacctttactagtcctttggagacaatttacctgtattaggagcccaggccacgctacactctgcccacactggtgagcaggaggtcttcccacgccctgtcattaggctgcatttactcttgctaaataaaagtgggagtggggcgtgcgcgttatccatgtattgcctttcagctctagatccccctcccctgcctgctctgcagtcgtgggtggggcccgtgcgccgtttctccttggtagcgtgcacggtgttgaactgggacactggggagaaaggggctttcatgtcgtttccttcctgctcctgctgcacagctgccaggagtgctctgcctggagtctgcagacctcagagaggtcccagcaccggctgtggcctttcaggtgtaggcaggtgggctctgcttcccgattccctgtgagcgcccaccctctcgaaagaattttctgcttgccctatgactgtgcagactctggctcgagcaacccggggaacttcaccctcaggggcctcccacaccttctccagcgaggaggtctcagtcccagcctcgggagggcacctccttttctgtgctttcttccctgaggcattcttcctcatccctagggtgttgtgtagaactctttttaaactctatgctccgagtagagttcatctttatattaaacttcccctgttcaaataa

SEQ ID NO: 371 - DNA, 711 bp, Homo sapiens
  ref <308>: DATABASE ACCESSION NUMBER: NCBI / NM_001344
  ref <309>: DATABASE ENTRY DATE: 2011-11-26
  ref <313>: RELEVANT RESIDUES IN SEQ ID NO: (1)..(711)
atgcgcaaacagcacatccggtgtggtcgacgggtcctccaagagtttggggcgcggactggagtaccttgcgtgcagttatgtcggcgtcggtagtgtctgtcatttcgcggttcttagaagagtacttgagctccactccgcagcgtctgaagttgctggacgcgtacctgctgtatatactgctgaccggggcgctgcagttcggttactgtctcctcgtggggaccttccccttcaactcttttctctcgggcttcatctcttgtgtggggagtttcatcctagcggtttgcctgagaatacagatcaacccacagaacaaagcggatttccaaggcatctccccagagcgagcctttgctgattttctctttgccagcaccatcctgcaccttgttgtcatgaactttgttggctgactcattctcatttacttaattgaggagtaggagactaaaagaatgttcactctttgaatttcctggataagagttctggagatggcagcttattggacacatggattttcttcagatttgcacttactgctagctctgctttttatgcaggagaaaagcccagagttcactgtgtgtcagaacaactttctaacaaacatttattaatccagcctctgcctttcattaaatgtaaccttttgccttccaaattaaagaactccatgccactcctcaaaaaaaaaaaaaa

SEQ ID NO: 372 - DNA, 874 bp, Homo sapiens
  ref <308>: DATABASE ACCESSION NUMBER: NCBI / NM_001914
  ref <309>: DATABASE ENTRY DATE: 2011-12-04
  ref <313>: RELEVANT RESIDUES IN SEQ ID NO: (1)..(874)
gcgccccgcccctgagccggccgcccagcccccagtggggttcccggcgcggggaatgtcccgggtggagctggctgagtcgcgcgctctgctccacccgacggggctgtgtgtgctgggcctggctcgcggcgaaccgagatggcagagcagtcggacgaggccgtgaagtactacaccctagaggagattcagaagcacaaccacagcaagagcacctggctgatcctgcaccacaaggtgtacgatttgaccaaatttctggaagagcatcctggtggggaagaagttttaagggaacaagctggaggtgacgctactgagaactttgaggatgtcgggcactctacagatgccagggaaatgtccaaaacattcatcattggggagctccatccagatgacagaccaaagttaaacaagcctccggaaccttaaaggcggtgtttcaaggaaactcttatcactactattgattctagttccagttggtggaccaactgggtgatccctgccatctctgcagtggccgtcgccttgatgtatcgcctatacatggcagaggactgaacacctcctcagaagtcagcgcaggaagagcctgctttggacacgggagaaaagaagccattgctaactacttcaactgacagaaaccttcacttgaaaacaatgattttaatatatctctttctttttcttccgacattagaaacaaaacaaaaagaactgtcctttctgcgctcaaatttttcgagtgtgcctttttattcatctactttattttgatgtttccttaatgtgtaatttacttattataagcatgatcttttaaaaatatatttggcttttaaagtatgcaaaaaaaaaaaaa

SEQ ID NO: 373 - DNA, 1226 bp, Homo sapiens
  ref <308>: DATABASE ACCESSION NUMBER: NCBI / NM_001834
  ref <309>: DATABASE ENTRY DATE: 2011-12-29
  ref <313>: RELEVANT RESIDUES IN SEQ ID NO: (1)..(1226)
ccgctcctcccgccgcggcgcccgcaccgcagtgacagccagccgggcccggtggcggagaggaagtgcggtccgcgccaagcccgtccccgccgacgccggctccccgcggctcgggtgacagcgtcgcggccgccggacgcagcgcggggcaggcgcgggcagagccgagcgcagcggaggctccggcggaggcgcggggaaaatggctgatgactttggcttcttctcgtcgtcggagagcggtgccccggaggcggcggaggaggacccggcggccgccttcctggcccagcaggagagcgagattgcaggcatagagaacgacgagggcttcggggcacctgccggcagccatgcggcccccgcgcagccgggccccacgagtggggctggttctgaggacatggggaccacagtcaatggagatgtgtttcaggaggccaacggtcctgctgatggctacgcagccattgcccaggctgacaggctgacccaggagcctgagagcatccgcaagtggcgagaggagcagaggaaacggctgcaagagctggatgctgcatctaaggtcacggaacaggaatggcgggagaaggccaagaaggacctggaggagtggaaccagcgccagagtgaacaagtagagaagaacaagatcaacaaccgggcatccgaggaggctttcgtgaaggaatccaaggaggagaccccaggcacagagtgggagaaggtggcccagctatgtgacttcaaccccaagagcagcaagcagtgcaaagatgtgtcccgcctgcgctcggtgctcatgtccctgaagcagacgccactgtcccgctaggtgcctgctaggtgcatggccacagagcatgggctgggcctgggcacaggaggagcagctgctttggtcggggtggagactcgcagcagctgctacccacagcctattccactcctccccatctccaggcgctgggaggggggccctcaccccatcacgcctcgctccctcctggccctctggtccagcccctcacgcctcctctcagtctactcaattgtgactgtccctcctgatgtattttttttcttggcttaaagggtgtgttgttgactctttttacacttatttattatcattctcacttctctggaagccaaaaaaaaaaaaaaaaaaaaaaaaaaaaaaaaaaaaaaaaaaaaaaaaaaaaaaaaaaaaaaaaaaa

SEQ ID NO: 374 - DNA, 1156 bp, Homo sapiens
  ref <308>: DATABASE ACCESSION NUMBER: NCBI / NM_001833
  ref <309>: DATABASE ENTRY DATE: 2011-11-28
  ref <313>: RELEVANT RESIDUES IN SEQ ID NO: (1)..(1156)
gattggttgttcccttttcggctctgcaacaccgcctagaccgaccggatacacgggtagggcttccgctttacccgtctccctcctggcgcttgtcctcctctcccagtcggcaccacagcggtggctgccgggcgtggtgtcggtgggtcggttggtttttgtctcaccgttggtgtccgtgccgttcagttgcccgccatggctgagctggatccgttcggcgcccctgccggcgcccctggcggtcccgcgctggggaacggagtggccggcgccggcgaagaagacccggctgcggccttcttggcgcagcaagagagcgagattgcgggcatcgagaacgacgaggccttcgccatcctggacggcggcgcccccgggccccagccgcacggcgagccgccggggggtccggatgctgttgatggagtaatgaatggtgaatactaccaggaaagtaatggtccaacagacagttatgcagctatttcacaagtggatcgattgcagtcagagcctgaaagtatccgtaaatggagagaagaacaaatggaacgcttggaagcccttgatgccaattctcggaagcaagaagcagagtggaaagaaaaggcaataaaggagctagaagaatggtatgcaagacaggacgagcagctacagaaaacaaaagcaaacaacagggcagcagaagaagcctttgtaaatgacattgacgagtcgtccccaggcactgagtgggaacgggtggcccggctgtgtgactttaaccccaagtctagcaagcaggccaaagatgtctcccgcatgcgctcagtcctcatctccctcaagcaggccccgctggtgcactgaagagccaccctgtggaaacactacatctgcaatatcttaatcctactcagtgaagctcttcacagtcattggattaattatgttgagttcttttggaccaaacctttttgtctttagagttgttcattgtttgtgattgcatgtttccttccttcaactgtgttctccctggcattcagagaggagggagaggaggaagaggaaggggagggaagcttcccaagagtagcctcaacctgtgcttctgtgcattattctgagaataaatttctgtttcaaactgtattaaaaaaaaaaa

SEQ ID NO: 375 - DNA, 1475 bp, Homo sapiens
  ref <308>: DATABASE ACCESSION NUMBER: NCBI / NM_001281
  ref <309>: DATABASE ENTRY DATE: 2011-12-17
  ref <313>: RELEVANT RESIDUES IN SEQ ID NO: (1)..(1475)
gccgcctcgggctcggctctctccgcgcagaggtttcatggcttgcttcaatcttttgatatcttagagtaattgcttccaatttttgggcatcgccgcctcagtttacagaatagtatggatctggtgccagagccgggaaaacgatgcgcatcgtaaaccgcaaaacactgagcatccaggacagaagccaaggcgcttggcttggttgaaggccagtgcgcatgcgcgagtttacccttcgcggactgggcgagctcttgccactcctacctccgggcttcagtcttcgccgcctgttctggtcctttcccgggccgctattggaagaaccgtgaactatggaaggcccctctggattggctgggctggcccaagagtaaggagagccctcttcctggcggtggggaagggacggcggcgattggcggacgctcctggcaggagagcgcggattggtcaggcacggagcaggaggcggggctgatagcccagcagcagcagcggcggcggcggctgcggagcgggtgtgaggcggctggaccgcgctgcaggcatccgcagggcgcggcaagatggaggtgacgggggtgtcggcacccacggtgaccgttttcatcagcagctccctcaacaccttccgctccgagaagcgatacagccgcagcctcaccatcgctgagttcaagtgtaaactggagttgctggtgggcagccctgcttcctgcatggaactggagctgtatggagttgacgacaagttctacagcaagctggatcaagaggatgcgctcctgggctcctaccctgtagatgacggctgccgcatccacgtcattgaccacagtggcgcccgccttggtgagtatgaggacgtgtcccgggtggagaagtacacgatctcacaagaagcctacgaccagaggcaagacacggtccgctctttcctgaagcgcagcaagctcggccggtacaacgaggaggagcgggctcagcaggaggccgaggccgcccagcgcctggccgaggagaaggcccaggccagctccatccccgtgggcagccgctgtgaggtgcgggcggcgggacaatcccctcgccggggcaccgtcatgtatgtaggtctcacagatttcaagcctggctactggattggtgtccgctatgatgagccactggggaaaaatgatggcagtgtgaatgggaaacgctacttcgaatgccaggccaagtatggcgcctttgtcaagccagcagtcgtgacggtgggggacttcccggaggaggactacgggttggacgagatatgacacctaaggaattcccctgcttcagctcctagctcagccactgactgcccctcctgtgtgtgcccatggcccttttctcctgaccccattttaattttattcattttttcctttgccattgatttttgagactcatgcattaaattcactagaaacccagaaagt

SEQ ID NO: 376 - DNA, 1492 bp, Homo sapiens
  ref <308>: DATABASE ACCESSION NUMBER: NCBI / NM_001749
  ref <309>: DATABASE ENTRY DATE: 2011-11-19
  ref <313>: RELEVANT RESIDUES IN SEQ ID NO: (1)..(1492)
cgggcgacagcagggccgcggtgcagtgtccgacccgagagttgcggcctgagtcaccggccccgccctccggagccggacgctgcgggaggcccgggagcggcagtggaaccgactcccagaactccggacgtgtgcggcgcagtgagtcgcagccatgttcctggttaactcgttcttgaagggcggcggcggcggcggcgggggaggcgggggcctgggtgggggcctgggaaatgtgcttggaggcctgatcagcggggccgggggcggcggcggcggcggcggcggcggcggcggtggtggaggcggcggtggcggtggaacggccatgcgcatcctaggcggagtcatcagcgccatcagcgaggcggctgcgcagtacaacccggagcccccgcccccacgcacacattactccaacattgaggccaacgagagtgaggaggtccggcagttccggagactctttgcccagctggctggagatgacatggaggtcagcgccacagaactcatgaacattctcaataaggttgtgacacgacaccctgatctgaagactgatggttttggcattgacacatgtcgcagcatggtggccgtgatggatagcgacaccacaggcaagctgggctttgaggaattcaagtacttgtggaacaacatcaaaaggtggcaggccatatacaaacagttcgacactgaccgatcagggaccatttgcagtagtgaactcccaggtgcctttgaggcagcagggttccacctgaatgagcatctctataacatgatcatccgacgctactcagatgaaagtgggaacatggattttgacaacttcatcagctgcttggtcaggctggacgccatgttccgtgccttcaaatctcttgacaaagatggcactggacaaatccaggtgaacatccaggagtggctgcagctgactatgtattcctgaactggagccccagacccgccccctcactgccttgctataggagtcacctggagcctcggtctctcccagggccgatcctgtctgcagtcacatctttgtggggcctgctgacccacaagcttttgttctctcagtacttgttacccagcttctcaacatccagggcccaatttgccctgcctggagttccccctggctctaggacactctaacaagctctgtccacgggtctccccattcccaccaggccctgcacacacccactccgtaacctctcccctgtacctgtgccaagcctagcacttgtgatgcctccatgccccgagggccctctctcagttctgggaggatgactccagtccctgcacgccctggcacacccttcacggttgctacccaggcggccaagctccagaccgtgccagacccaggtgccccagtgcctttgtctatattctgctcccagcctgccaggcccaggaggaaataaacatgccccagttgctgatctctaaaaaaaaaaaaaaa

SEQ ID NO: 377 - DNA, 815 bp, Homo sapiens
  ref <308>: DATABASE ACCESSION NUMBER: NCBI / NM_001697
  ref <309>: DATABASE ENTRY DATE: 2011-12-17
  ref <313>: RELEVANT RESIDUES IN SEQ ID NO: (1)..(815)
agagaacctagcggttacgccaacgcgcgcgtgcgcccttgcgcgtttctctcttcccactcgggtttgacctacagccgcccgggagaagatggctgccccagcagtgtccgggctctcccggcaggtgcgatgcttcagtacctctgtggtcagaccatttgccaagcttgtgaggcctcctgttcaggtatacggtattgaaggtcgctatgccacagctctttattctgctgcatcaaaacagaataagctggagcaagtagaaaaggagttgttgagagtagcacaaatcctgaaggaacccaaagtggctgcttctgttttgaatccctatgtgaagcgttccattaaagtgaaaagcctaaatgacatcacagcaaaagagaggttctctcccctcactaccaatctgatcaatttgcttgctgaaaatggtcgattaagcaatacccaaggagtcgtttctgccttttctaccatgatgagtgtccatcgcggagaggtaccttgcacagtgacctctgcatctcctttagaagaagccacactctctgaattaaaaactgtcctcaagagcttcctaagtcaaggccaagtattgaaattggaggctaagactgatccgtcaatcttgggtggaatgattgtgcgcattggcgagaaatatgttgacatgtctgtcaagaccaagattcagaagctgggcagggctatgcgggagattgtctaaaagtgttggttttctgccatcagtgaaaattcttaaacttggagcaacaataaaaagcttccagaacagatcaaaaaaaaaa

SEQ ID NO: 378 - DNA, 2651 bp, Homo sapiens
  ref <308>: DATABASE ACCESSION NUMBER: NCBI / NM_001689
  ref <309>: DATABASE ENTRY DATE: 2011-08-13
  ref <313>: RELEVANT RESIDUES IN SEQ ID NO: (1)..(2651)
cttcatccgggtgctgcggcgcgaataagagccggaccgcgcttgcgcattgagtcccactccttcgacctctgccgcagcccgtgccgccgccgcctcctgggaagagaggaagcgggagaggagcccacgtcgcctgtcacccaatatctccagccgcgcagtcccgaagagtgtaagatgttcgcctgcgccaagctcgcctgcaccccctctctgatccgagctggatccagagttgcatacagaccaatttctgcatcagtgttatctcgaccagaggctagtaggactggagagggctctacggtatttaatggggcccagaatggtgtgtctcagctaatccaaagggagtttcagaccagtgcaatcagcagagacattgatactgctgccaaatttattggtgcaggtgctgcaacagtaggagtggctggttctggtgctggtattggaacagtctttggcagccttatcattggttatgccagaaacccttcgctgaagcagcagctgttctcatatgctatcctgggatttgccttgtctgaagctatgggtctcttttgtttgatggttgctttcttgattttgtttgccatgtaacaaattactgcttgacatgttggcattcatattaattacggatgtaattctgtgtatcttactgtgactccgaaaactgtagtattggtgtcatgggaatgtacgttatttccaaagtcatttcattaaagatgaaaactttaatttcttctgtgatttgtacttacactaagtttagattatcacaaagaagaacgtgcattcaggcagatgctgtcccattcagaggaagctacagcagttgctccactgatgaaaaatattccaatgtaatttttatgggaattcttttatatagtgttctgcatattgtaattcatagggcttttgtttattcatataaaggataaatatttgggtgttttgagcttctataaaatatgattaattaaaggtagttaatactcaagatggtcttgagtttttaaggtctaacatcagttagaatacttcaaatcagaatcaccttccaagactgacttgacaggtggttctaaaaataaatcacgtcagctttttaggaaatgaagccttaagctagggggtaatgtgacttttgtttttcagtaagtctcacattaagcaattgtgtgcctctaatgaatcttccatgtcttttcagaacaggctcagtccaactagcagctagtttcttacttgaacaagactattaaaaaccaaatatcaaaaaactgaattggctagatttttacagccaaaaattgctgtaaggcagtgtgtatcactgttgctaacatgtttatagtgggagtcttggggatgatagctggttcaacagtattttgctgctaatactttatgttgcttcttggtcaaacttttcccattcaaaggaagaagatggtgctactatagacagtttttcccctagcaaatatattgtaccataatatctatcatccaagtttcagggttttttgaaagttgataattaggaaagtgacattttacttttcttagtgccctttgcctgtttgatttccattgagaaagagcagtcaccaaagttcctcaagtgtcggaagaccacctccatcagaatcagtgcttgtttaaaaaataaaaatccctaggttccagacctactgaattggactctttggacatgagactcagcaatctacatctttaaaaaggcttcccaggtggtttttgtgcatactgtttgagagtcactaagttatatatatatcctaccttctgtaaagtgaaatgaggccccaaaaagctaaagaggtagagctgctacctcgtttttagttgattcatcatctagtctatatcacccaaaagaattggaaataggtattcaaacaaaaacctgtatacaagtattcatagaagcactacttacaatagccgaaaggtagaaacaaccaaatgtctatcagctgatgaatggataagtaaaatacatccatataatggaatattcagccatgaaaaggaatgaggcactgatacataatgaatagatgtgagtgaaccctaagaaagcatgctaagtggaagaagccagccacatgattccatttatatgaaatatccaaaataggcaaatccacggtgacaaagccaattagtagttatcaggaactagggagggggtgaaaagggagtgactgcgtaatgcgtatggggattccttttaggatgatgaaaattggatgaattacagctggtctgatggtagtgggttatcagaacttattaacattagtgtcattaaagttggtatatagcccctcactgctaaatctggctcaaaaattaaaagattattaaaatttgatgaattagtggtgatggttgcacaacattgtaaatataataaatgtcactgaattgtacactttaaggtggttaaaatggcaaattttacatgtcttactgaaactactatttaatacaaagtacatagtataaaattttaaaagtgataggaaaatgcttagattaatattcacctattccaagtatattttaaataaaaacagtcttggtaaagaaaaaaaaaaaaa

SEQ ID NO: 379 - DNA, 2022 bp, Homo sapiens
  ref <308>: DATABASE ACCESSION NUMBER: NCBI / NM_001675
  ref <309>: DATABASE ENTRY DATE: 2011-11-19
  ref <313>: RELEVANT RESIDUES IN SEQ ID NO: (1)..(2022)
tttctactttgcccgcccacagatgtagttttctctgcgcgtgtgcgttttccctcctccccgccctcagggtccacggccaccatggcgtattaggggcagcagtgcctgcggcagcattggcctttgcagcggcggcagcagcaccaggctctgcagcggcaacccccagcggcttaagccatggcgtgagtaccggggcgggtcgtccagctgtgctcctggggccggcgcgggttttggattggtggggtgcggcctggggccagggcggtgccgccaagggggaagcgatttaacgagcgcccgggacgcgtggtctttgcttgggtgtccccgagacgctcgcgtgcctgggatcgggaaagcgtagtcgggtgcccggactgcttccccaggagccctacagccctcggaccccgagccccgcaagggtcccaggggtcttggctgttgccccacgaaacgtggcaggaaccaagatggcggcggcagggcggcggcgcgggcgtgagtcaagggcgggcggtgggcggggcgcggccgccctggccgtatttggacgtggggacggagcgctttcctcttggcggccggtggaagaatcccctggtctccgtgagcgtccattttgtggaacctgagttgcaagcagggaggggcaaatacaactgccctgttcccgattctctagatggccgatctagagaagtcccgcctcataagtggaaggatgaaattctcagaacagctaacctctaatgggagttggcttctgattctcattcaggcttctcacggcattcagcagcagcgttgctgtaaccgacaaagacaccttcgaattaagcacattcctcgattccagcaaagcaccgcaacatgaccgaaatgagcttcctgagcagcgaggtgttggtgggggacttgatgtcccccttcgaccagtcgggtttgggggctgaagaaagcctaggtctcttagatgattacctggaggtggccaagcacttcaaacctcatgggttctccagcgacaaggctaaggcgggctcctccgaatggctggctgtggatgggttggtcagtccctccaacaacagcaaggaggatgccttctccgggacagattggatgttggagaaaatggatttgaaggagttcgacttggatgccctgttgggtatagatgacctggaaaccatgccagatgaccttctgaccacgttggatgacacttgtgatctctttgcccccctagtccaggagactaataagcagcccccccagacggtgaacccaattggccatctcccagaaagtttaacaaaacccgaccaggttgcccccttcaccttcttacaacctcttcccctttccccaggggtcctgtcctccactccagatcattcctttagtttagagctgggcagtgaagtggatatcactgaaggagataggaagccagactacactgcttacgttgccatgatccctcagtgcataaaggaggaagacaccccttcagataatgatagtggcatctgtatgagcccagagtcctatctggggtctcctcagcacagcccctctaccaggggctctccaaataggagcctcccatctccaggtgttctctgtgggtctgcccgtcccaaaccttacgatcctcctggagagaagatggtagcagcaaaagtaaagggtgagaaactggataagaagctgaaaaaaatggagcaaaacaagacagcagccactaggtaccgccagaagaagagggcggagcaggaggctcttactggtgagtgcaaagagctggaaaagaagaacgaggctctaaaagagagggcggattccctggccaaggagatccagtacctgaaagatttgatagaagaggtccgcaaggcaagggggaagaaaagggtcccctagttgaggatagtcaggagcgtcaatgtgcttgtacatagagtgctgtagctgtgtgttccaataaattattttgtagggaaagta

SEQ ID NO: 380 - DNA, 3827 bp, Homo sapiens
  ref <308>: DATABASE ACCESSION NUMBER: NCBI / NM_001642
  ref <309>: DATABASE ENTRY DATE: 2011-11-27
  ref <313>: RELEVANT RESIDUES IN SEQ ID NO: (1)..(3827)
agaaggagggcgtggtaatatgaagtcagttccggttggtgtaaaacccccggggcggcggcgaactggctttagatgcttctgggtcgcggtgtgctaagcgaggagtccgagtgtgtgagcttgagagccgcgcgctagagcgacccggcgagggatggcggccaccgggaccgcggccgccgcagccacgggcaggctcctgcttctgctgctggtggggctcacggcgcctgccttggcgctggccggctacatcgaggctcttgcagccaatgccggaacaggatttgctgttgctgagcctcaaatcgcaatgttttgtgggaagttaaatatgcatgtgaacattcagactgggaaatgggaacctgatccaacaggcaccaagagctgctttgaaacaaaagaagaagttcttcagtactgtcaggagatgtatccagagctacagatcacaaatgtgatggaggcaaaccagcgggttagtattgacaactggtgccggagggacaaaaagcaatgcaagagtcgctttgttacacctttcaagtgtctcgtgggtgaatttgtaagtgatgtcctgctagttccagaaaagtgccagtttttccacaaagagcggatggaggtgtgtgagaatcaccagcactggcacacggtagtcaaagaggcatgtctgactcagggaatgaccttatatagctacggcatgctgctcccatgtggggtagaccagttccatggcactgaatatgtgtgctgccctcagacaaagattattggatctgtgtcaaaagaagaggaagaggaagatgaagaggaagaggaagaggaagatgaagaggaagactatgatgtttataaaagtgaatttcctactgaagcagatctggaagacttcacagaagcagctgtggatgaggatgatgaggatgaggaagaaggggaggaagtggtggaggaccgagattactactatgacaccttcaaaggagatgactacaatgaggagaatcctactgaacccggcagcgacggcaccatgtcagacaaggaaattactcatgatgtcaaagctgtctgctcccaggaggcgatgacggggccctgccgggccgtgatgcctcgttggtacttcgacctctccaagggaaagtgcgtgcgctttatatatggtggctgcggcggcaacaggaacaattttgagtctgaggattattgtatggctgtgtgtaaagcgatgattcctccaactcctctgccaaccaatgatgttgatgtgtatttcgagacctctgcagatgataatgagcatgctcgcttccagaaggctaaggagcagctggagattcggcaccgcaaccgaatggacagggtaaagaaggaatgggaagaggcagagcttcaagctaagaacctccccaaagcagagaggcagactctgattcagcacttccaagccatggttaaagctttagagaaggaagcagccagtgagaagcagcagctggtggagacccacctggcccgagtggaagctatgctgaatgaccgccgtcggatggctctggagaactacctggctgccttgcagtctgacccgccacggcctcatcgcattctccaggccttacggcgttatgtccgtgctgagaacaaagatcgcttacataccatccgtcattaccagcatgtgttggctgttgacccagaaaaggcggcccagatgaaatcccaggtgatgacacatctccacgtgattgaagaaaggaggaaccaaagcctctctctgctctacaaagtaccttatgtagcccaagaaattcaagaggaaattgatgagctccttcaggagcagcgtgcagatatggaccagttcactgcctcaatctcagagacccctgtggacgtccgggtgagctctgaggagagtgaggagatcccaccgttccaccccttccaccccttcccagccctacctgagaacgaagacactcagccggagttgtaccacccaatgaaaaaaggatctggagtgggagagcaggatgggggactgatcggtgccgaagagaaagtgattaacagtaagaataaagtggatgaaaacatggtcattgacgagactctggatgttaaggaaatgattttcaatgccgagagagttggaggcctcgaggaagagcgggaatccgtgggcccactgcgggaggacttcagtctgagtagcagtgctctcattggcctgctggtcatcgcagtggccattgccacggtcatcgtcatcagcctggtgatgctgaggaagaggcagtatggcaccatcagccacgggatcgtggaggttgatccaatgctcaccccagaagagcgtcacctgaacaagatgcagaaccatggctatgagaaccccacctacaaatacctggagcagatgcagatttaggtggcagggagcgcggcagccctggcggagggatgcaggtgggccggaagatcccacgattccgatcgactgccaagcagcagccgctgccaggggctgcgtctgacatcctgacctcctggactgtaggactatataaagtactactgtagaactgcaatttccattcttttaaatgggtgaaaaatggtaatataacaatatatgatatataaaccttaaatgaaaaaaatgatctattgcagatatttgatgtagttttcttttttaaattaatcagaaaccccacttccattgtattgtctgacacatgctctcaatatataataaatgggaaatgtcgattttcaataatagacttatatgcaggctgtcgttccggttatgttgtgtaagtcaactcttcagcctcattcactgtcctggcttttatttaaagaaaaaaaaggcagtattccctttttaaatgagctttcaggaagttgctgagaaatggggtggaatagggaactgtaatggccactgaagcacgtgagagaccctcgcaaaatgatgtgaaaggaccagtttcttgaagtccagtgtttccacggctggatacctgtgtgtctccataaaagtcctgtcaccaaggacgttaaaggcattttattccagcgtcttctagagagcttagtgtatacagatgagggtgtccgctgctgctttccttcggaatccagtgcttccacagagattagcctgtagcttatatttgacattcttcactgtctgttgtttacctaccgtagctttttaccgttcacttccccttccaactatgtccagatgtgcaggctcctcctctctggactttctccaaaggcactgaccctcggcctctactttgtcccctcacctccaccccctcctgtcaccggccttgtgacattcactcagagaagaccacaccaaggaggcggccgctggcccaggagagaacacggggaggtttgtttgtgtgaaaggaaagtagtccaggctgtccctgaaactgagtctgtggacactgtggaaagctttgaacaattgtgttttcgtcacaggagtctttgtaatgcttgtacagttgatgtcgatgctcactgcttctgctttttctttctttttattttaaatctgaaggttctggtaacctgtggtgtatttttattttcctgtgactgtttttgttttgtttttttcctttttcctcccctttgaccctattcatgtctctacccactatgcacagattaaacttcacctacaaactccttaatatgatctgtggagaatgtacacagtttaaacacatcaataaatactttaacttccaccgagaaaaaaaaaaaaaaaa

SEQ ID NO: 381 - DNA, 3931 bp, Homo sapiens
  ref <308>: DATABASE ACCESSION NUMBER: NCBI / NM_014724
  ref <309>: DATABASE ENTRY DATE: 2005-09-23
  ref <313>: RELEVANT RESIDUES IN SEQ ID NO: (1)..(3931)
gggtcccaaaagggttcgaggcctcttgccttcgctccgtaggagggagttctcttctggccctgggggccgcaggactgtccaggaatacagtttccaggtgagatcttacttgaaacaccggtagttctagcacagctaaaatggcatctacttgggctatccaggcccacatggaccaggatgaacctttggaagtaaagatagaggaagagaaatataccaccagacaggattgggacctgcgtaaaaacaacacccatagcagagaggtcttccgtcagtacttcagacagttctgctaccaggagacatctggtccccgtgaggctttgagccgactccgagaactttgccatcagtggctgaggccagagacccacaccaaagaacagattctggagctgctggtgctggagcagttcctgaccatcctacctgaggagctccaggcctgggtgcaggagcagcatccagagagtggggaggaggtggtgactgtgctggaggatttagagagagaactggatgaaccaggagagcaggtctcagtccacactggggaacaggaaatgttcttgcaggagacggtacgtctacgaaaagaaggagaacccagtatgtccctccagtccatgaaagcccagccaaagtatgaatctccagaacttgaatcccaacaggagcaagttttagatgttgagactggaaatgagtatgggaatttaaagcaagaagtttctgaagaaatggaaccacatgggaagacatccagtaaatttgaaaatgatatgtccaagtctgctaggtgtggagaaactcgtgaacctgaagaaataacagaagagccctctgcttgctccagagaagataaacaacctacctgtgatgaaaatggagtaagcctgactgagaactctgaccatactgaacatcagagaatctgtccaggagaagaatcttacggatgtgatgactgtggaaaagcttttagtcagcactcacacctcatagaacatcagaggatccatactggagatagaccctacaaatgcgaagaatgtggaaaagctttccgtgggagaactgtgcttattcgacacaaaataatacacactggagagaaaccgtataagtgtaatgaatgtggcaaagcctttggccggtggtcagctcttaaccaacatcagagacttcacacaggagaaaaacactatcactgtaatgactgtggcaaagcctttagtcagaaagcaggcctctttcaccatatcaagatccacacaagagacaaaccttatcagtgcactcagtgtaataaaagttttagtcggcgttccatacttactcagcatcaaggagttcataccggcgccaagccgtatgagtgcaacgagtgtggaaaagcctttgtttataactcatcccttgtttcccatcaggaaatccaccacaaagaaaaatgctatcagtgtaaggaatgtgggaaatccttcagtcagagtggccttattcagcatcagagaattcacactggggaaaaaccctacaaatgtgacgtatgtgaaaaagcctttattcaaaggacaagtcttacagaacatcagcgaattcacactggagaaagaccctataaatgtgataagtgtgggaaggcgtttactcaaagatcagtcctcacggaacatcagagaatccacactggagagaggccctacaagtgtgatgagtgtgggaatgccttccgaggaatcaccagcctcattcagcatcagagaatccacactggggagaagccctaccaatgtgatgagtgtggaaaagccttcagacagaggaagaagaccagctacaaggaaatacttctgaaaaatcactctgaaccccaagctggagtgaatcttctcctgagctctctcattccagaatggcaatcttgtttcaggagagatctctaatagtgactgatggtaaaggaagaaggctgtgcctagaacaaagaatcaggctggcaaagaaatcacaggtctttcctcaaactttaaattgctactctctggagatagctacctggactttacagagctgtcagaagacttgggaaggtttgccagcattggaaaaagccacttggacttcacagagctgtcagaagacttaggaagctttgccagtagttcctgagaccagaaatacatattatgaagcaggtgctggaacaggccctggcccctacttgtgaagctgcagatatagatggtgttactgagaaggaaactaaggacttggctccaaaacaaaacaaaacaaaatctggagatgctgaattttgttggggggaatgtctgtagaactgcaacatcaatgcagtaagtgtagtaaaagctttagtttatggtgagtcattactcagcatcatggagtccacgatgaagagaatctcttttcaatctgtgcaatcaacaagtttttgaaaggcttttgtttatagtggaaccctcttttccccctagaagaaccaccacaaggaaaaatgctgtcaccataaggaatgtgggaaagttttcagccacatggccttatttgacttcaaagaatccacatgagagagagactgcataaatgtaataactgaggaggcctttgttcagcaaagaaaccttatacaaactcgtataaagaatgtaggaagaccttcacccagaagccaggactgactgtgcaccagagaatctgcacaataaacctgatgaatgtggagatgcttgcttcagcattggagaattcacagtaaagggaaaccctgccagtgtgatgagtacggaaaagtcttcagaggttggaacttgggaaaaatcagtgagtgaattcatattagagaggctcttataaatgagaggattgtggaaacttgtatagacagagatcagacctcaacaagggagcctccacagtattgaaaagttaatataattaatgtaagtgggcaagttgtatggggaatgggtagtctaaattgctcattttagccagtaaaaacattaaattagtttcttagatcaagaaaaggaaatgttagaagttatttttcccttccagaggggtctatatgtgtaagcaaccaggacttttgaaataagttgcatctctggatttgtgatctgtctcctggatgattatctctgttttgggagacaggtattttttcttcatgcctgctctagtctcatctcatatctttaattcattcagcaagtatacacaatagtattatcgtctactgtttgttgtaaatatatatatattattttctttttggtctgagtaggcttgtattggtaccctaggacataaaaatcacatatatcatgtttcagtaaatgcagtgaaaggaactatattattaaattgctgggaatttctgtaaatttgagactacctttatattctccaacacaagaccgtgtaggtgtcccttcagagagtatatttttctagcttggcttctttattttctttatttttttgagatggagtcttgctcctgtcgcccaggctggagtgcaatggcacgatctcggctcactgcaacctccgcctcccaggttcaagtgattctcctgtctcagtctcccgagtagctgggattacaggcacttgccaccattcccagctaatttttgtatttttagtagagacggggtttcaccatgttggccaggctggtctcgaactcctgaccttgtgatctgcccaccttggcctcccaaagttcagggattacaggcatgagccaccatgcccggctgttttttttaagatagaaaaatatacttcatgtatagcctattgacagataatgactgatattttttcttatagataacacataataaacattgtgaagactaaaaaaaaaaaaaaaaaaaaa

SEQ ID NO: 382 - DNA, 1568 bp, Homo sapiens
  ref <308>: DATABASE ACCESSION NUMBER: NCBI / NM_005494
  ref <309>: DATABASE ENTRY DATE: 2011-11-19
  ref <313>: RELEVANT RESIDUES IN SEQ ID NO: (1)..(1568)
ggagaaaggagagaaaggaaagcgcgaggagccgccgccaccaccagcgcagcagtcctggagctgtgaggagattcgggccgtcaccctgcctcccctgcgtcccgccaccggccgcttctgtcctcggacccattccaacaatctcgtaaaacatggtggattactatgaagttctaggcgtgcagagacatgcctcacccgaggatattaaaaaggcatatcggaaactggcactgaagtggcatccagataaaaatcctgagaataaagaagaagcagagagaaaattcaagcaagtagcggaggcatatgaagtgctgtcggatgctaagaaacgggacatctatgacaaatatggcaaagaaggattaaatggtggaggaggaggtggaagtcattttgacagtccatttgaatttggcttcacattccgtaacccagatgatgtcttcagggaattttttggtggaagggacccattttcatttgacttctttgaagacccttttgaggacttctttgggaatcgaaggggtccccgaggaagcagaagccgagggacggggtcgtttttctctgcgttcagtggatttccgtcttttggaagtggattttcttcttttgatacaggatttacttcatttgggtcactaggtcacgggggcctcacttcattctcttccacgtcatttggtggtagtggcatgggcaacttcaaatcgatatcaacttcaactaaaatggttaatggcagaaaaatcactacaaagagaattgtcgagaacggtcaagaaagagtagaagttgaagaagatggccagttaaagtccttaacaataaatggtaaggagcagctgctgcgcttggataacaagtaattcaacgcacgcacttaacagaaatgttaaactataacaagcaccatttgaggattaacaggaacatttttttgaagatttcaaacgaactcgactttcagtataattgtacctaaagtatttataaacagctcatcggagcctctatttgtcatagacttttgagttgattgttgggaccacataataggaccattttttttttgtctttaaaattgttgtaaatctctgtatgcactttgcttttttattaaacgtactccaaggtgagtcttgactctttagtgtaggacaagattgtacactaacaccagcatggacctgcttttcattgtgtctgaaatgtgagccacgtagtgtcggcctgctgtgaagttaacattgccaggacgattcttctacagaaataatttcaatttttttcagtatttagtagtgaaagatattaatacattaatggtaatacatttctggtttaatataaattaaggatgttttctagttgtgcatgaatgctggcaacttagtaagttttgacaattgtttaaatatgtaatgttaagcttaggtttaaaaaagtaaagctggtaaactgggtctttgtcatttgctttaaaaaaaaaaaaaaagaaaataaatgcgaatgtgttggtgcattcttcctgagtgggatctggaaaaaaaaaa

SEQ ID NO: 383 - DNA, 2331 bp, Homo sapiens
  ref <308>: DATABASE ACCESSION NUMBER: NCBI / NM_006597
  ref <309>: DATABASE ENTRY DATE: 2011-12-04
  ref <313>: RELEVANT RESIDUES IN SEQ ID NO: (1)..(2331)
ccttctggaaggttctaagatagggtataagaggcagggtggcgggcggaaaccggtctcattgaactcgcctgcagctcttgggttttttgtggcttccttcgttattggagccaggcctacaccccagcaaccatgtccaagggacctgcagttggtattgatcttggcaccacctactcttgtgtgggtgttttccagcacggaaaagtcgagataattgccaatgatcagggaaaccgaaccactccaagctatgtcgcctttacggacactgaacggttgatcggtgatgccgcaaagaatcaagttgcaatgaaccccaccaacacagtttttgatgccaaacgtctgattggacgcagatttgatgatgctgttgtccagtctgatatgaaacattggccctttatggtggtgaatgatgctggcaggcccaaggtccaagtagaatacaagggagagaccaaaagcttctatccagaggaggtgtcttctatggttctgacaaagatgaaggaaattgcagaagcctaccttgggaagactgttaccaatgctgtggtcacagtgccagcttactttaatgactctcagcgtcaggctaccaaagatgctggaactattgctggtctcaatgtacttagaattattaatgagccaactgctgctgctattgcttacggcttagacaaaaaggttggagcagaaagaaacgtgctcatctttgacctgggaggtggcacttttgatgtgtcaatcctcactattgaggatggaatctttgaggtcaagtctacagctggagacacccacttgggtggagaagattttgacaaccgaatggtcaaccattttattgctgagtttaagcgcaagcataagaaggacatcagtgagaacaagagagctgtaagacgcctccgtactgcttgtgaacgtgctaagcgtaccctctcttccagcacccaggccagtattgagatcgattctctctatgaaggaatcgacttctatacctccattacccgtgcccgatttgaagaactgaatgctgacctgttccgtggcaccctggacccagtagagaaagcccttcgagatgccaaactagacaagtcacagattcatgatattgtcctggttggtggttctactcgtatccccaagattcagaagcttctccaagacttcttcaatggaaaagaactgaataagagcatcaaccctgatgaagctgttgcttatggtgcagctgtccaggcagccatcttgtctggagacaagtctgagaatgttcaagatttgctgctcttggatgtcactcctctttcccttggtattgaaactgctggtggagtcatgactgtcctcatcaagcgtaataccaccattcctaccaagcagacacagaccttcactacctattctgacaaccagcctggtgtgcttattcaggtttatgaaggcgagcgtgccatgacaaaggataacaacctgcttggcaagtttgaactcacaggcatacctcctgcaccccgaggtgttcctcagattgaagtcacttttgacattgatgccaatggtatactcaatgtctctgctgtggacaagagtacgggaaaagagaacaagattactatcactaatgacaagggccgtttgagcaaggaagacattgaacgtatggtccaggaagctgagaagtacaaagctgaagatgagaagcagagggacaaggtgtcatccaagaattcacttgagtcctatgccttcaacatgaaagcaactgttgaagatgagaaacttcaaggcaagattaacgatgaggacaaacagaagattctggacaagtgtaatgaaattatcaactggcttgataagaatcagactgctgagaaggaagaatttgaacatcaacagaaagagctggagaaagtttgcaaccccatcatcaccaagctgtaccagagtgcaggaggcatgccaggaggaatgcctgggggatttcctggtggtggagctcctccctctggtggtgcttcctcagggcccaccattgaagaggttgattaagccaaccaagtgtagatgtagcattgttccacacatttaaaacatttgaaggacctaaattcgtagcaaattctgtggcagttttaaaaagttaagctgctatagtaagttactgggcattctcaatacttgaatatggaacatatgcacaggggaaggaaataacattgcactttataaacactgtattgtaagtggaaaatgcaatgtcttaaataaaactatttaaaattggcaccataaaaaaaaaaaaaa

SEQ ID NO: 384 - DNA, 2021 bp, Homo sapiens
  ref <308>: DATABASE ACCESSION NUMBER: NCBI / NM_006623
  ref <309>: DATABASE ENTRY DATE: 2011-11-27
  ref <313>: RELEVANT RESIDUES IN SEQ ID NO: (1)..(2021)
gcagggatttggcaacctcagagccgcgaggaggaggcggagtcgcggagagtttgagtatttccgtccaatcaaaaggagactgtaagaggaggaggaggaggagatgactggggagcgggagctggagaatactgcccagttactctagcgcgccaggccgaaccgcagcttcttggcttaggtacttctactcacagcggccgattccgaggccaactccagcaatggcttttgcaaatctgcggaaagtgctcatcagtgacagcctggacccttgctgccggaagatcttgcaagatggagggctgcaggtggtggaaaagcagaaccttagcaaagaggagctgatagcggagctgcaggactgtgaaggccttattgttcgctctgccaccaaggtgaccgctgatgtcatcaacgcagctgagaaactccaggtggtgggcagggctggcacaggtgtggacaatgtggatctggaggccgcaacaaggaagggcatcttggttatgaacacccccaatgggaacagcctcagtgccgcagaactcacttgtggaatgatcatgtgcctggccaggcagattccccaggcgacggcttcgatgaaggacggcaaatgggagcggaagaagttcatgggaacagagctgaatggaaagaccctgggaattcttggcctgggcaggattgggagagaggtagctacccggatgcagtcctttgggatgaagactatagggtatgaccccatcatttccccagaggtctcggcctcctttggtgttcagcagctgcccctggaggagatctggcctctctgtgatttcatcactgtgcacactcctctcctgccctccacgacaggcttgctgaatgacaacacctttgcccagtgcaagaagggggtgcgtgtggtgaactgtgcccgtggagggatcgtggacgaaggcgccctgctccgggccctgcagtctggccagtgtgccggggctgcactggacgtgtttacggaagagccgccacgggaccgggccttggtggaccatgagaatgtcatcagctgtccccacctgggtgccagcaccaaggaggctcagagccgctgtggggaggaaattgctgttcagttcgtggacatggtgaaggggaaatctctcacgggggttgtgaatgcccaggcccttaccagtgccttctctccacacaccaagccttggattggtctggcagaagctctggggacactgatgcgagcctgggctgggtcccccaaagggaccatccaggtgataacacagggaacatccctgaagaatgctgggaactgcctaagccccgcagtcattgtcggcctcctgaaagaggcttccaagcaggcggatgtgaacttggtgaacgctaagctgctggtgaaagaggctggcctcaatgtcaccacctcccacagccctgctgcaccaggggagcaaggcttcggggaatgcctcctggccgtggccctggcaggcgccccttaccaggctgtgggcttggtccaaggcactacgcctgtactgcaggggctcaatggagctgtcttcaggccagaagtgcctctccgcagggacctgcccctgctcctattccggactcagacctctgaccctgcaatgctgcctaccatgattggcctcctggcagaggcaggcgtgcggctgctgtcctaccagacttcactggtgtcagatggggagacctggcacgtcatgggcatctcctccttgctgcccagcctggaagcgtggaagcagcatgtgactgaagccttccagttccacttctaaccttggagctcactggtccctgcctctggggcttttctgaagaaacccacccactgtgatcaatagggagagaaaatccacattcttgggctgaacgcgggcctctgacactgcttacactgcactctgaccctgtagtacagcaataaccgtctaataaagagcctacccccaactccttctgcaaaaaaa

SEQ ID NO: 385 - DNA, 2172 bp, Homo sapiens
  ref <308>: DATABASE ACCESSION NUMBER: NCBI / NM_015646
  ref <309>: DATABASE ENTRY DATE: 2011-11-28
  ref <313>: RELEVANT RESIDUES IN SEQ ID NO: (1)..(2172)
acccgcgcgccccgcccgcgggcggaagctggagcgaggctgaacgcctgacgtcaaggcgacatcgccaaacctcgcccagattcaggcgtgtaaaccagccggagcggcgcggcagcggcaggaccgccgtggcgcctagagtagcgacccggggggagcgcggggcgacgctggctgcagggacccggtgacagcgtgagaggttcgcagagtactaggttttgacaagcttgcatcatgcgtgagtataagctagtcgttcttggctcaggaggcgttggaaagtctgctttgactgtacaatttgttcaaggaatttttgtagaaaaatacgatcctacgatagaagattcttatagaaagcaagttgaagtagatgcacaacagtgtatgcttgaaatcttggatactgcaggaacggagcaatttacagcaatgagggatttatacatgaaaaatggacaaggatttgcattagtttattccatcacagcacagtccacatttaacgatttacaagacctgagagaacagattcttcgagttaaagacactgatgatgttccaatgattcttgttggtaataagtgtgacttggaagatgaaagagttgtagggaaggaacaaggtcaaaatctagcaagacaatggaacaactgtgcattcttagaatcttctgcaaaatcaaaaataaatgttaatgagatcttttatgacctagtgcggcaaattaacagaaaaactccagtgcctgggaaggctcgcaaaaagtcatcatgtcagctgctttaatatactaaatgcattgtagctctgagccaggtctgaagaactgttgcccaattcaacagtgccagcattccaactttgttaaacctaccaacatcttaaatggactttcctgtggtggtaccctttaagaggcggatgaaagctactatatcagtttgcacattctaatcactttccagtatcacaagagagatttttacttatataatagtcctagagtttgcagctggtaaaaccagaggctacatccagtattactgctaagagacattcttcatccaccaatgttgtacatgtatgaaaatggtgtactgtatactttaacatgccccatactttgtattggagagtacaataatgtaaatcctaaaagcaccactattttagcataataaaagaaagtccaaagagctcctatatagactactccagataacttcgcttctttgatacttgtagcttattgtaattttttttaagaaattcaaggtcattattattgtacaaaataagcgctttgattaacacagctatatagtttttttaatttttaaaaaacctgtggagacggtgatcttgtctttaaaacatgatagtcctttcagtataatgtcttagattaaagacgttgcctttaatatctgttgggaaggaaatgtccagacttttcaaatctcttattatatgtttcctttttttgtttacatagggaacaatgtttatagtcgtgtgtacagtgggggtctacaacaagaagtgtatattttcaaacaattttttaatgatttaacaatttttgtaaatcattttcaggcttctgcagctgtagattctcactgtgaatcccttgcttgctcatgcataagtgtatttgcaataccaaatatacaggtttagtatttttgcctgttagtgattgtttcacatgtgtaacgttttggttgagatgttaaatggtggacgagtactgtggatgtgaatgtgggaagtaattttaatcatatgtaattggtcacaaggcctaatttgcagtaactattgctgttttatttaacaatgccttgttgctttgtatgcattaatgtttggatgtaaagattgtgtgtctatccaacagggagccacagtatttaaattgaccaacctaatgttacaactactttgaggtggccaaatgtaaactaaaagccttaattaaagtggtgcaattttgtataacttagcatcagtagttcaataaatttggattgccatgcaagggcttgcattataattacttgccacttgaatgtgttttgtgtaatgttttaacagtgctagtaaataaatacgggtttaccctggttttaattgtaaaaaaaaaaaaaaaaaaaaaaa

SEQ ID NO: 386 - DNA, 3001 bp, Homo sapiens
  ref <308>: DATABASE ACCESSION NUMBER: NCBI / NM_016532
  ref <309>: DATABASE ENTRY DATE: 2011-11-28
  ref <313>: RELEVANT RESIDUES IN SEQ ID NO: (1)..(3001)
acgctgggagctgcggacggcgggcgcgggctgggccgggtctagtggcggccgcacacctcgcgtcgtctggggcagtgttgcgcgtgcgctgatgacaggcccgacacgcccctcttacgtccgcgaacccgtcttcgctcagcctctcgcagctttgcgctcgtgggagagtcccgcctccttctgcgaaccgcaccacccagatcccggggtgcgcggagggcgcgtctctgacggaagccggggcggacggtcggagtccggaagaaaaacagtccgcgacagctaggcgcgtgagaccggccgcccgcagggctgctctggccgggacccgctggccgggagacgcgaacctgccggaccaccgcgcggggacgacggcggccatgagctcgcggaagctgagcgggccgaaaggcaggaggctcagcatacacgtcgtgacttggaacgtggcttcggcagcgccccctctagatctcagtgacctgcttcagctgaacaaccggaacctcaatcttgacatatatgttattggtttgcaggaattgaactctgggatcataagcctcctttccgatgctgcctttaatgactcgtggagcagtttcctcatggatgtgctttcccctctgagcttcatcaaggtctcccatgtccgtatgcaggggatcctcttactggtctttgccaagtatcagcatttgccctatatccagattctgtctactaaatccacccccactggcctgtttgggtactgggggaacaaaggtggagtcaacatctgcctgaagctttatggctactatgtcagcatcatcaactgccacctgcctccccacatttccaacaattaccagcggctggagcactttgaccggatcctggagatgcagaattgtgaggggcgagacatcccaaacatcctggaccacgacctcattatctggtttggagacatgaactttcggatcgaggactttgggttgcactttgttcgggaatccattaaaaatcggtgctacggtggcctgtgggagaaggaccagctcagcattgccaagaaacatgacccgctgctccgggagttccaggagggccgcctactcttcccgcccacctacaagtttgataggaactccaacgactatgacaccagtgagaaaaaacgcaagcctgcatggaccgatcgcatcctgtggaggctgaagcggcagccctgtgctggccccgacactcccataccgccggcgtcacacttctccttgtctctgaggggctacagcagccacatgacgtacggcatcagcgaccacaagcctgtctccggcacgttcgacttggagctgaagccattggtgtctgctccgctgatcgtcctgatgcccgaggacctgtggaccgtggaaaatgacatgatggtcagctactcttcaacctcggacttccccagcagcccgtgggactggattggactgtacaaggtggggctgcgggacgttaatgactacgtgtcctatgcctgggtcggggacagcaaggtctcctgcagcgacaacctgaaccaggtttacatcgacatcagcaatatccctaccactgaagatgagtttctcctctgttactacagcaacagtctgcgttctgtggtggggataagcagacccttccagatcccgcctggctccttgagggaggacccactgggtgaagcacagccacagatctgagccaggatgggagtgaatcccaggcggaggccagagctggcagccagctctgcctttccactgccgggagtgctgggggcccagcctggccccctgaagagacagccaagtgtcgtccacatactcctcccagagtgagctctaaccaggctcatttgctctctccactactcatctctggaattagccgcttaaatacaggtttttgttgctgagatgtgagtgaaaccagctagtgtgtcaacagtgaagacctggggacagttctgcgtctcatttctggattcctaccccctcttctagtcttgcccaagtagtcctgccaggcacatgccccatttggcacaggcctgcattcttgtcgtgccgtcctgggcctcaggctgtctgggaggggagatgctcacatttgtacaggctacatagactggtgcaagcagtgctggattccaggagtcttggcatctcatagcttgtccccgtgaggagtgagcagagggtctgggatttctgctttcagcaaaagcagtctgactcagtgggcagaatggaggggcccctctagccaggctcttacgccatggttatgagcaggttgatgagggtccttcggccagcacaaccttcctccctactcacggcatggagtctgactgcatggaagttccagatcctgacagagagaactgggaaggatccaggttcgcttccgttggtagcttgagtcccatgcctccaccctgccatctgaggaaggggtgacaagtggtcaaggagctgtggccacagacttttccagggtggtccttggcaggtgaggtgcgtctgtgccacccttgtcaggagccattgacgacgggccccccctggaccccccgggacctcagagtgggggcaggcagaagggagaaccagctcaagacattttggaggatctggccctggggttcttcagagaacaccctctaggggctttggggacatggcctgtccccacatccagcacttgcctccgccatggtcactcggcagcccttttcccaggagaagacacctctgggagcctgctcagtgcttgtcctgccatcctgtgtcctgggactgagggttactccagttgctctgtgttgcatactctcccccgcaagcctgtgtatgaagaattgtcccctggcttccagcaggccatggctggctgttttgtgactgttacattgtgcaggggtaattattagcgtggcttttaaaaaaaaaaaaaaaaaaaa

SEQ ID NO: 387 - DNA, 4255 bp, Homo sapiens
  ref <308>: DATABASE ACCESSION NUMBER: NCBI / NM_015292
  ref <309>: DATABASE ENTRY DATE: 2011-12-24
  ref <313>: RELEVANT RESIDUES IN SEQ ID NO: (1)..(4255)
tggcttgaagtcccctcctccatcccggggatcacgttttgcctgggggagctgatcgcaagactaggcaacctccagccagtccctgggtcgggcggatcctcccagaggtggcacaatggagcgatctccaggagagggccccagccccagccccatggaccagccctctgctccctccgaccccactgaccagccccccgctgctcacgcaaagccagacccaggttctgggggccaacctgctggccctggcgcggcgggtgaggccctggcggtgctgacttcattcgggaggcggttgctggtgctgatacctgtgtatttggccggggcagtgggactcagcgtgggtttcgtgctcttcggcctcgccctctacctgggctggcgccgggtccgcgacgagaaagaacggagccttcgagcagcgaggcagctactggacgacgaggagcagctcactgcgaaaactctctatatgagtcatcgagagctacctgcctgggtcagcttcccagacgtggaaaaggctgaatggctcaataagattgtggcccaggtctggcccttcctgggccagtatatggagaagcttctggctgaaactgtggctccggctgttaggggatctaacccccatctgcaaacatttacatttacacgagtggaactgggtgaaaagccattgcgcatcattggagtcaaggttcacccaggtcagagaaaagagcagatcctgctggacttgaacatcagctatgtaggtgatgtgcagattgatgtggaagtgaagaaatatttttgcaaagcaggagtcaagggcatgcagctacatggcgttttgcgggtgatactggagccactcattggggaccttcccttcgtgggggctgtgtcaatgttcttcatccgacgcccgaccctagacatcaactggacagggatgaccaacctgctggatatcccaggacttagctcactctctgacaccatgatcatggactccattgctgccttcctcgtgttgcccaaccgattactggtgccccttgtgcctgaccttcaagatgtggctcagttgcgttcccctctgcccaggggcattattcgaattcacctgctggctgctcgagggctgagttccaaggacaaatatgtgaagggcctgattgagggcaagtcagacccatatgcacttgtgcgtttgggtacccagacattctgcagtcgtgtcattgatgaagaactcaacccacagtggggagagacttatgaggtgatggtacacgaggtcccagggcaggagattgaagtggaggtgttcgacaaggatccagataaagatgactttctgggcagaatgaagctggatgtagggaaggtgttacaggctagcgttctggatgattggttccctctacaaggtgggcaaggccaagttcacttgaggctagaatggctgtcacttttgtcagatgcagagaaactggagcaggttctacagtggaattggggagtctcctctcgaccagatcccccgtcagctgccatcttagttgtctacctggatcgggcccaggatcttcctctgaagaaggggaacaaggaacccaaccctatggtacaactgtcaattcaggatgtgactcaggagagcaaggctgtctacagtaccaactgcccagtgtgggaggaagcgttccggttcttcctacaagaccctcaaagccaggagctcgatgtgcaagtgaaggatgattccagggccctgactttaggagcactgacgctgcctctggcccgcctgctgactgccccagaactcatcctggaccagtggttccagctcagcagctctggtccaaactccagactctatatgaaactagtcatgaggatcctgtacttggattcatcagaaatatgcttccccacggtgcctggttgtcctggtgcttgggacgtggacagtgagaatccccagagaggcagcagtgtggatgccccacctcgaccctgtcacacgactcctgatagccagtttgggactgagcatgtgcttcggatccatgtattagaggcccaggacctgattgccaaagaccgtttcttggggggactggtgaagggcaagtcagacccctatgtcaaactaaagttggcaggacgaagcttccggagccatgttgttcgggaagatctcaatccccgctggaatgaggtttttgaggtgatcgtcacatcagttccaggccaagagctagaggttgaagtctttgacaaggacttggacaaggatgattttctgggcaggtgtaaagtgcgtctcaccacagtcttaaacagtggcttccttgatgagtggctgaccctggaggatgtcccatctggccgcctgcacttgcgcctggagcgtctcaccccccgtcccactgctgctgagttagaggaggtgctgcaggtgaatagtttgatccagactcagaagagtgcggagctggctgcggccctgctatccatctatatggagcgggcagaggacctcccgctgcgaaaaggcaccaagcacctcagcccttatgctactctcactgtgggagatagttctcataaaaccaagactatttcgcaaacttcagcccctgtctgggatgagagtgcctcctttctcatcaggaaaccacacactgagagcctagagttgcaggttcggggtgagggcactggcgtgctgggctcattatccctgcccctctcagagctcctcgtggctgaccagctctgcttggaccgctggtttacactcagcagtggtcaggggcaggtgctactgagagcacagctagggatcctggtgtcccagcactcgggagtggaagctcatagccacagctacagccacagctcctcatcgctgagtgaagaaccagagctctcggggggaccccctcacatcacctcctcagccccagagctccggcagcgcctaacacatgttgacagtccccttgaggctccagccgggcctctgggccaggtgaaactgactctgtggtactacagtgaagaacgaaagctggtcagcattgttcatggttgccggtcccttcgacagaatggacgtgatcctcctgatccctatgtgtcactgttgctactgccagacaagaaccgaggcaccaagaggaggacctcacagaagaagaggaccctgagtcctgaatttaatgaacggtttgagtgggaactccccctggatgaggcccagagacgaaagctggatgtctctgtcaagtctaattcctccttcatgtcaagagagcgtgagctgctggggaaggtgcagctggacctagctgagacagacctttcccagggtgtagcccggtggtatgacctgatggacaacaaggacaagggcagctcctaggagctggcgagtcccagcctgactgctctgtcttcctgccttcgtctcgctccatcaccgcctcaatgtgatgagcctaaagctagggtccaagggcagagcctgtgcccttcagccctttcacctaacaggcccatattcgggcctttgcctgaccaaagagaagaaccgtatgttccctttactgcacggcctttatccttctgggcccctggggcggggacctgagctggctgtttcctgctttgcctgcacattgttctcccttcctcccaactcctcagggccttctgtatctgtgcctggccagtggcagcactagcagtggtattagcttatgccaaatacagctttggaaggatctttttttctttaactagatggtcaccttcttccctaccacacatgggtgggaaggtggacaggctaacctctccagctgtgagcctcttagactactgcatgtagcaaatgttcagcagctcaggcccccatgtccagttctgtccccactgtcctcaaccctgtcctgaaaattctactgctttgatggctggggccagtctcttgtcactttggaaactgaggacgcgtggattctactcaagcctccaagtagtggcatatcagtcttggagctcctagctggtgatacggagagggctttggaggacttgggacagcagggccaatttttttgcccaagtgcctaggctgctaactcactgactagaacttaatctggtactttacagttttgcaccaactctgccaagccactggatcttacattaaacatcatactcaaaccagcaaaaaaaa

SEQ ID NO: 388 - DNA, 2318 bp, Homo sapiens
  ref <308>: DATABASE ACCESSION NUMBER: NCBI / NM_005870
  ref <309>: DATABASE ENTRY DATE: 2011-12-04
  ref <313>: RELEVANT RESIDUES IN SEQ ID NO: (1)..(2318)
taaagtgtcgagcttctcctcgcgagagacttagtgctcatgctcgctgcaggggtcggaggtcagggcgagcgtctcgcaggccgtaggaggaagatggcggtggagtcgcgcgttacccaggaggaaattaagaaggagccagagaaaccgatcgaccgcgagaagacatgcccactgttgctacgggtcttcaccaccaataacggccgccaccaccgaatggacgagttctcccggggaaatgtaccgtccagcgagttgcagatctacacttggatggatgcaaccttgaaagaactgacaagcttagtaaaagaagtctacccagaagctagaaagaagggcactcacttcaattttgcaatcgtttttacagatgttaaaagacctggctatcgagttaaggagattggcagcaccatgtctggcagaaaggggactgatgattccatgaccctgcagtcgcagaagttccagataggagattacttggacatagcaattacccctccaaatcgggcaccacctccttcagggcgcatgagaccatattaaattctatttactatttgttgaatttatttttccgtcagttatgtaaaataaacatactcttcttcctcccctgattattgccattaagcctttaaattctaaacaaattataatgcatcatctatttaggagttagatttggatgtgctattgtatgattacgaatagtctgtatgtttcaagcccttctgtaaaatatgaagaaaagtgctcttagcattctgtgtaaaactgtactgttaaatatatgtgtgtaatcagcctgagtgtgaaagttaatggaggcctgggaacagggtttatactaagtagtggaggagcgtatggttaagcccaaaggggcagaacaagaaagccacgggattgtatgaaatcaaacatgagtttgtggtgtagactgctgtatgcagttggaaaggacacgtgagagtgagctcaagtggcagcagaggcagtttggaataagctgcggcaagttgaagaagctgtgttggacgagattgccccgccttgatcagggtaccatgacataaaaggttaaagaacaggcaacacaatgagcacttaagtttttaacatgtggggaatagggcattttaaaggctggaaccagttcagaggaaacaagggtttgggtagaggtagaaaggtttaattaaccctggagatctgcaaatggagggaggggtgaaggaggaatcttaagaccgagggagaagagccaaggacaaggtcaggttgaatgagtaggaggtgttcacacatcctcttgtgtgctaggtagtggcgtgcatctgatctgagaggcagtaaagcagtgatgaagacagtgcagcagaacattgaagtcctgattgcagcagtgactctgcaaccttggataaattatttcaatctttattttgtaaaacggagataacggcctataggattgttaagactgaatattttaaaagagcttagaatggtgcctgacaaatgagaaacaataaatactgattattggccataaagtggtattaaaactggatctcttttcttccatggcactactctcattttgaagtttatgaacagtacgacagtgtattgtaaattccctttagtttgttacagtagccaattgaaaatgtatatcccaaaatttaaaaaaaaaagtaccagcagcaataaaattgcactagttttatctggtacatacaaaaacagccatttaaaatctgatgattctgtggaattggtgtccctgttagcaatggcagagaccagcctggagcctagatctggtgcttcttctgtgctgtggtttaccccaaacctttaggttgtttattcattcagattagatagactggagccataaagttaatttgcacctagctttttggagaatagccatgattaactgctattcgtggtgggggtgggggggaaccctatgatttactatgcagatgaagagggtaggaactaaataaaggactttgtaagccaaagtggttgggctgctttgtcaaattccaccctttgcttggttccaacatggaatttctcctttaaagatttcaatatcccatcaaaagtacagttagagaatacctagtgaatttattgaatataatgctaagaatcaaaagacttgtactagtttacctctggctttggtaagtgtggctttgagtaataactgagctgtttccccgcatataaaatagaaataaataagtagtcatcatgacagcaaaaaaaaaaaaaaaaaa

SEQ ID NO: 389 - DNA, 1441 bp, Homo sapiens
  ref <308>: DATABASE ACCESSION NUMBER: NCBI / NM_006833
  ref <309>: DATABASE ENTRY DATE: 2011-11-20
  ref <313>: RELEVANT RESIDUES IN SEQ ID NO: (1)..(1441)
ggcggggccgaggctggcgggcgcggggaaaatggcggcggcggcggcggcggctgcagctacgaacgggaccggaggaagcagcgggatggaggtggatgcagcagtagtccccagcgtgatggcctgcggagtgactgggagtgtttccgtcgctctccatccccttgtcattctcaacatctcagaccactggatccgcatgcgctcccaggaggggcggcctgtgcaggtgattggggctctgattggcaagcaggagggccgaaatatcgaggtgatgaactcctttgagctgctgtcccacaccgtggaagagaagattatcattgacaaggaatattattacaccaaggaggagcagtttaaacaggtgttcaaggagctggagtttctgggttggtataccacaggggggccacctgacccctcggacatccacgtccataagcaggtgtgtgagatcatcgagagccccctctttctgaagttgaaccctatgaccaagcacacagatcttcctgtcagcgtttttgagtctgtcattgatataatcaatggagaggccacaatgctgtttgctgagctgacctacactctggccacagaggaagcggaacgcattggtgtagaccacgtagcccgaatgacagcaacaggcagtggagagaactccactgtggctgaacacctgatagcacagcacagcgccatcaagatgctgcacagccgcgtcaagctcatcttggagtacgtcaaggcctctgaagcgggagaggtcccctttaatcatgagatcctgcgggaggcctatgctctgtgtcactgtctcccggtgctcagcacagacaagttcaagacagatttttatgatcaatgcaacgacgtggggctcatggcctacctcggcaccatcaccaaaacgtgcaacaccatgaaccagtttgtgaacaagttcaatgtcctctacgaccgacaaggcatcggcaggagaatgcgcgggctctttttctgatgagggtacttgaagggctgatggacaggggtcaggcaactatcccaaaggggagggcactacacttccttgagagaaaccgctgtcattaataaaaggggagcagcccctgagcacccctgctggtggctctgtcctctgttaggcaccacactggttggtcaacttggatgttcatcgaggctcattctggccttgctcagaagcccttctgatgctcttcagtgagggaggcactaccatttgaagtgaccccatgtcagtcacatggactggtctttagcaaagtccaaggctgcctgcttccacctaagtggtctctgttctacactttaatgtcaccctctacatcatcttacctagcccacccaaccttataaacatgataattgactactttcctgagctaaaaaaaaaaaaaaaaaa

SEQ ID NO: 390 - DNA, 1988 bp, Homo sapiens
  ref <308>: DATABASE ACCESSION NUMBER: NCBI / NM_005718
  ref <309>: DATABASE ENTRY DATE: 2011-12-04
  ref <313>: RELEVANT RESIDUES IN SEQ ID NO: (1)..(1988)
gggtgggaagaaggtgggcctcgagcaaagccgctagaggtggggtgcgggtggtcggcctcaggcgagccccggggcacagcccggggcgggaggcggagcttggcggccgagatctccgcgctgcagttagccccgccgagcgccaggagctgcgggtaggaggggcgagagaaaggatgggggtacagaaccggaagaaacgaagggctcgtccgcttcggcttgtcctaatttggtgcccaatctgaagctgggctgtaccattgcatacctgggggaggctgtggcaaaggtgacaagaaggccgaaggcacaaagggaagctgcacccattcctggaggagcttaaatagtgactcgagtgcaagaatttaaaaataccgagacagccctaggtggaaaacttccggaaggcccaagcgttcgtaagggctctctaccccgctcggagcatagatggtaccgtccggaagtccgggcggagaccgtagctgcgcttctcgcgaaagggcaggcatcgcggggctggccacttccgtacttccgctttccggcccagccagcgcccgcgatgactgccactctccgcccctacctgagtgccgtgcgggccacattgcaggctgccctctgcctggagaacttctcctcccaggttgtggaacgacacaacaagccggaagtggaagtcaggagtagcaaagagctcctgttacaacctgtgaccatcagcaggaatgagaaggaaaaggttctgattgagggctccatcaactctgtccgggtcagcattgctgtgaaacaggctgatgagatcgagaagattttgtgccacaagttcatgcgcttcatgatgatgcgagcagagaacttctttatccttcgaaggaagcctgtggaggggtatgatatcagctttctgatcaccaacttccacacagagcagatgtacaaacacaagttggtggactttgtgatccacttcatggaggagattgacaaggagatcagtgagatgaagctgtcagtcaatgcccgtgcccgcattgtggctgaagagttccttaagaatttttaaaccatctggctggatctcgtggccttccccctcagactacccatgtctccacgaaggcgtcctggagtcactccccgagcagcgcggcggcggcagggagttgggttggggtgggcatttgatgcgggaggtgggtggtgtgcttgctagctgggcaagaaagcagcagtggacctgccccaaggccacacgtgcctggtcaggctggcttctgatgttcagtcccctgggccgggacagattttttttaacgtcttgaaacttaaactctgtgcttgtaggatactgtaacctttttgtctttttttttttttttttttttaaacctccacctccagtggctgtgactggtcccagtgattatacgttattggttgctgtgggtctgggcgggcctggagccagaaggcgacttattttttctctcctatgccaccccaggtggggagggagggaggtttcagactccagtttctcccttgcccttttattcccaagcctccttggccccagtataagtgttgggaactctctgccagcttcctgagttctgcctaaagatggccccccagcactggttggggacaagggccaaattggtgaccaccagtcatgcctaggacctggggcccaaaagccgggcaacctctggctacaggggccattgggtgccctcccagttgagaggggccgctgtttcgccttgtccgtcagtgccagtgcctgtgccagaggtggcgaggtgagtcctccagagcttcctggccgggccctcctcctgcctgttctggctcctctgctcccacgctagctgtcccttttctgattctggtggatcctccctcccctaattaaagtctctttttgcccctttggggctgcatgaggtcaaaaaaaaaaaaaaaaa

SEQ ID NO: 391 - DNA, 912 bp, Homo sapiens
  ref <308>: DATABASE ACCESSION NUMBER: NCBI / NM_005719
  ref <309>: DATABASE ENTRY DATE: 2011-11-20
  ref <313>: RELEVANT RESIDUES IN SEQ ID NO: (1)..(912)
cgcttccgcctacctcgcccaggctgccagaccggaagcgctccgctgtacctggatcctgctcctctgggttgaaacccgggcgccgccaagatgccggcttaccactcttctctcatggatcctgataccaaactcatcggaaacatggcactgttgcctatcagaagtcaattcaaaggacctgcccccagagagacaaaagatacagatattgtggatgaagccatctattacttcaaggccaatgtcttcttcaaaaactatgaaattaagaatgaagctgataggaccttgatatatataactctctacatttctgaatgtctgaagaaactgcaaaagtgcaattccaaaagccaaggtgagaaagaaatgtatacgctgggaatcactaattttcccattcctggagagcctggttttccacttaacgcaatttatgccaaacctgcaaacaaacaggaagatgaagtgatgagagcctatttacaacagctaaggcaagagactggactgagactttgtgagaaagttttcgaccctcagaatgataaacccagcaagtggtggacttgctttgtgaagagacagttcatgaacaagagtctttcaggacctggacagtgaagggagcccgggcagccaccgtctccagagccctgggcagcattttccagcaagatgtacacaatcttttgcctttatttcgtaaagttttatacagaagagagaagagcatgtctttacttgaaaaactcttgatcaagaatttgggtgggagaaaagaaagtgggttatcaagggtgatttgaaattttctgcagcattaaagctggcgcttaataagaataagtaataataaagaaatttctaacattccaaaaaaaaaaaaaaaaaaaaaaaaaaaaa

SEQ ID NO: 392 - DNA, 3194 bp, Homo sapiens
  ref <308>: DATABASE ACCESSION NUMBER: NCBI / NM_006372
  ref <309>: DATABASE ENTRY DATE: 2011-12-24
  ref <313>: RELEVANT RESIDUES IN SEQ ID NO: (1)..(3194)
agcgcgggagagagaaagagaggagccgactcggcagggactgggggaccgggccgagagtgcgagcgagcgagggagggagtgagggagcgtgcgagccagaaggggaaaggcggccactcgtgcctgagcgaccgcagaggggagtgggagcagtggggtaaaggagcggggggcgggaataagaaaggccgagagaaggcggacagaggctagtggtggtggtggtggtagggggagaaggaggagctggaggagggcaggggctgagggagtgagtgaagcggacgcgcgagggaggggagggaagggaagggaagggaagggggggtcacgcgggggcgcgcgcgcgcaccgggagcgcgctcggaggcgagtggaactggatcgggtttgctgccagcggcgtgagcttcggccgccattttacaacagctccactcgcgccggacacagggagcagcgagcacgcgtttcccgcaacccgataccatcggacaggatttctccgcctcagcccaacggggagatctctggaaacatggctacagaacatgttaatggaaatggtactgaagagcccatggatactacttctgcagttatccattcagaaaattttcagacattgcttgatgctggtttaccacagaaagttgctgaaaaactagatgaaatttacgttgcagggctagttgcacatagtgatttagatgaaagagctattgaagctttaaaagaattcaatgaagacggtgcattggcagttcttcaacagtttaaagacagtgatctctctcatgttcagaacaaaagtgcctttttatgtggagtcatgaagacttacaggcagagagaaaaacaagggaccaaagtagcagattctagtaaaggaccagatgaggcaaaaattaaggcactcttggaaagaacaggctacacacttgatgtgaccactggacagaggaagtatggaggaccacctccagattccgtttattcaggtcagcagccttctgttggcactgagatatttgtgggaaagatcccaagagatctatttgaggatgaacttgttccattatttgagaaagctggacctatatgggatcttcgtctaatgatggatccactcactggtctcaatagaggttatgcgtttgtcactttttgtacaaaagaagcagctcaggaggctgttaaactgtataataatcatgaaattcgttctggaaaacatattggtgtctgcatctcagttgccaacaataggctttttgtgggctctattcctaagagtaaaaccaaggaacagattcttgaagaatttagcaaagtaacagagggtcttacagacgtcattttataccaccaaccggatgacaagaaaaaaaacagaggcttttgctttcttgaatatgaagatcacaaaacagctgcccaggcaaggcgtaggttaatgagtggtaaagtcaaggtctgggggaatgttggaactgttgaatgggctgatcctatagaagatcctgatcctgaggttatggcaaaggtaaaagtgctgtttgtacgcaaccttgccaatactgtaacagaagagattttagaaaaggcatttagtcagtttgggaaactggaacgagtgaagaagttaaaagattatgcgttcattcattttgatgagcgagatggtgctgtcaaggctatggaagaaatgaatggcaaagacttggagggagaaaatattgaaattgtttttgccaagccaccagatcagaaaaggaaagaaagaaaagctcagaggcaagcagcaaaaaatcaaatgtatgacgattactactattatggtccacctcatatgccccctccaacaagaggtcgagggcgtggaggtagaggtggttatggatatcctccagattattatggatatgaagattattatgattattatggttatgattaccataactatcgtggtggatatgaagatccatactatggttatgaagattttcaagttggagctagaggaaggggtggtagaggagcaaggggtgctgctccatccagaggtcgtggggctgctcctccccgcggtagagccggttattcacagagaggaggtcctggatcagcaagaggcgttcgaggtgcgagaggaggtgcccaacaacaaagaggccgcggggtacgtggtgcgaggggtggccgcggtggaaatgtaggaggaaagcgcaaagctgatgggtacaaccagccagattccaagcggcgccagaccaataatcagaactggggctcccaacccattgctcagcaaccgctccaaggtggtgatcattctggtaactatggttacaaatctgaaaaccaggagttttatcaggatacttttgggcaacagtggaagtagaaacagtagggcctctgtaaaattggagactgataggttgatcagaaactcaccctaaatctgaacgggtgccgctataatttgtgacatctggcaagatttccctttatgtatatattttaacaatccgcttggacacgaacaaagccacacttctaactgcttctggcgaactgattttatttttaatttttttcaataaagatattcttagatactgaaagaaatagttaatgagtttgcatttgtgcttgagaaaatttggctcaagtccatttggctgtagtgtcaacgatgtttccagtagtgtttagatttggtgtcttcaaaggtagttgattaaaaccaagtgtgtctttaatatcttgtatcagaataactttgtatgttaccaacttaaattgctagaataaggtaaattgatacacaactgctatttttaatttagaactttgacctaatttgggttttcaaaaccattttggctacttgtattctttatgctgttgtttatttcaataaaaaattcacacctaaatgtatacttactaaaattgtgtttacaattcgtttttcacaaaatttcctgcaaatttggttcaaattgtatagcatgtcaaggccaattaaagggttttgtgccttgttaattcttgtgtggaatatgtctgcacattacacaacactgatttattgcagttttctgcttctggtttaaagtgctattttacaacagacttcatgttcccatcaaaaataaaaagataatacatgtagtaag

SEQ ID NO: 393 - DNA, 3435 bp, Homo sapiens
  ref <308>: DATABASE ACCESSION NUMBER: NCBI / NM_005180
  ref <309>: DATABASE ENTRY DATE: 2011-12-19
  ref <313>: RELEVANT RESIDUES IN SEQ ID NO: (1)..(3435)
acagcaactatgaaataatcgtagtatgagaggcagagatcggggcgagacaatggggatgtgggcgcgggagccccgttccggcttagcagcacctcccagccccgcagaataaaaccgatcgcgccccctccgcgcgcgccctcccccgagtgcggagcgggaggaggcggcggcggccgaggaggaggaggaggaggccccggaggaggaggcgttggaggtcgaggcggaggcggaggaggaggaggccgaggcgccggaggaggccgaggcgccggagcaggaggaggccggccggaggcggcatgagacgagcgtggcggccgcggctgctcggggccgcgctggttgcccattgacagcggcgtctgcagctcgcttcaagatggccgcttggctcgcattcattttctgctgaacgacttttaactttcattgtcttttccgcccgcttcgatcgcctcgcgccggctgctctttccgggattttttatcaagcagaaatgcatcgaacaacgagaatcaagatcactgagctaaatccccacctgatgtgtgtgctttgtggagggtacttcattgatgccacaaccataatagaatgtctacattccttctgtaaaacgtgtattgttcgttacctggagaccagcaagtattgtcctatttgtgatgtccaagttcacaagaccagaccactactgaatataaggtcagataaaactctccaagatattgtatacaaattagttccagggcttttcaaaaatgaaatgaagagaagaagggatttttatgcagctcatccttctgctgatgctgccaatggctctaatgaagatagaggagaggttgcagatgaagataagagaattataactgatgatgagataataagcttatccattgaattctttgaccagaacagattggatcggaaagtaaacaaagacaaagagaaatctaaggaggaggtgaatgataaaagatacttacgatgcccagcagcaatgactgtgatgcacttaagaaagtttctcagaagtaaaatggacatacctaatactttccagattgatgtcatgtatgaggaggaacctttaaaggattattatacactaatggatattgcctacatttatacctggagaaggaatggtccacttccattgaaatacagagttcgacctacttgtaaaagaatgaagatcagtcaccagagagatggactgacaaatgctggagaactggaaagtgactctgggagtgacaaggccaacagcccagcaggaggtattccctccacctcttcttgtttgcctagccccagtactccagtgcagtctcctcatccacagtttcctcacatttccagtactatgaatggaaccagcaacagccccagcggtaaccaccaatcttcttttgccaatagacctcgaaaatcatcagtaaatgggtcatcagcaacttcttctggttgatacctgagactgttaaggaaaaaaattttaaacccctgatttatatagatatcttcatgccattacagctttctagatgctaatacatgtgactatcgtccaatttgctttcttttgtagtgacattaaatttggctataaaagatggactacatgtgatactcctatggacgttaattgaaaagaaagattgttgttataaagaattggtttcttggaaagcaggcaagactttttctctgtgttaggaaagatgggaaatggtttctgtaaccattgtttggatttggaagtactctgcagtggacataagcattgggccatagtttgttaatctcaactaacgcctacattacattctccttgatcgttcttgttattacgctgttttgtgaacctgtagaaaacaagtgctttttatcttgaaattcaaccaacggaaagaatatgcatagaataatgcattctatgtagccatgtcactgtgaataacgatttcttgcatatttagccattttgattcctgtttgatttatacttctctgttgctacgcaaaaccgatcaaagaaaagtgaacttcagttttacaatctgtatgcctaaaagcgggtactaccgtttattttactgacttgtttaaatgattcgcttttgtaagaatcagatggcattatgcttgttgtacaatgccatattggtatatgacataacaggaaacagtattgtatgatatatttataaatgctataaagaaatattgtgtttcatgcattcagaaatgattgttaaaattctcccaactggttcgacctttgcagatacccataacctatgttgagccttgcttaccagcaaagaatatttttaatgtggatatctaattctaaagtctgttccattagaagcaattggcacatctttctatactttatatacttttctccagtaatacatgtttactttaaagattgttgcagtgaagaaaaacctttaactgagaaatatggaaaccgtcttaattttccattggctatgatggaattaatattgtattttaaaaatgcatattgatcactataattctaaaacaattttttaaataaaccagcaggttgctaaaagaaggcattttatctaaagttattttaataggtggtatagcagtaattttaaatttaagagttgcttttacagttaacaatggaatatgccttctctgctatgtctgaaaatagaagctatttattatgagcttctacaggtatttttaaatagagcaagcatgttgaatttaaaatatgaataaccccacccaacaattttcagtttattttttgctttggtcgaacttggtgtgtgttcatcacccatcagttatttgtgagggtgtttattctatatgaatattgtttcatgtttgtatgggaaaattgtagctaaacatttcattgtccccagtctgcaaaagaagcacaattctattgctttgtcttgcttatagtcattaaatcattacttttacatatattgctgttacttctgctttctttaaaaatatagtaaaggatgttttatgaagtcacaagatacatatatttttattttgacctaaatttgtacagtcccattgtaagtgttgtttctaattatagatgtaaaatgaaatttcatttgtaattggaaaaaatccaataaaaaggatattcatttagaaaatagctaagatctttaataaaaatttgatatgaaaagcacaatgtgcagaagttatggaaaacctatagaggattacaacaggtaaacgttaaagagaatacattgctgacttatagtgatgtggctaagaagtacatgctttgttgtaaaattgcttgaaagcccattgaaagatgtatctgtttatttacagtctttgaagtaaaagttaccaatgtttgccaataaaaa

SEQ ID NO: 394 - DNA, 2196 bp, Homo sapiens
  ref <308>: DATABASE ACCESSION NUMBER: NCBI / NM_018975
  ref <309>: DATABASE ENTRY DATE: 2011-12-25
  ref <313>: RELEVANT RESIDUES IN SEQ ID NO: (1)..(2196)
actctcgatgcgccgcggctgctgctgcgcaggcccagtgctgcgcttcgcggcagaggcgtctgcggtgacagctcagtcagttgagctctgtgtgccaggcgctcgcgagggggtagctcttctagtagtgctcggcgtcagacatggcggaggcgatggatttgggcaaagaccccaacgggcccacccattcctcgactctgttcgtgagggacgacggcagctccatgtccttctacgtgcggcccagcccggccaagcgtcggctgtcgacgctcatcctgcacggcggcggcaccgtgtgccgagtgcaggagcccggggccgtgctgctggcccagcccggggaggcgctggccgaggcctcgggtgatttcatctccacgcagtacatcctggactgcgtggagcgcaacgagaggctggagctggaggcctatcggctgggccccgcctcggcggcggacaccggctcggaagcaaagcccggggccctggccgagggcgccgcggagccggagccgcagcggcacgccgggcggatcgccttcacggatgcggacgacgtagccatccttacctacgtgaaggaaaatgcccgctcgcccagctccgtcaccggtaacgccttgtggaaagcgatggagaagagctcgctcacgcagcactcgtggcagtccctgaaggaccgctacctcaagcacctgcggggccaggagcataagtacctgctgggggacgcgccggtgagcccctcctcccagaagctcaagcggaaggcggaggaggacccggaggccgcggatagcggggaaccacagaataagagaactccagatttgcctgaagaagagtatgtgaaggaagaaatccaggagaatgaagaagcagtcaaaaagatgcttgtggaagccacccgggagtttgaggaggttgtggtggatgagagccctcctgattttgaaatacatataactatgtgtgatgatgatccacccacacctgaggaagactcagaaacacagcctgatgaggaggaagaagaagaagaagaaaaagtttctcaaccagaggtgggagctgccattaagatcattcggcagttaatggagaagtttaacttggatctatcaacagttacacaggccttcctaaaaaatagtggtgagctggaggctacttccgccttcttagcgtctggtcagagagctgatggatatcccatttggtcccgacaagatgacatagatttgcaaaaagatgatgaggataccagagaggcattggtcaaaaaatttggtgctcagaatgtagctcggaggattgaatttcgaaagaaataattggcaagataatgagaaaagaaaaaagtcatggtaggtgaggtggttaaaaaaaattgtgaccaatgaactttagagagttcttgcattggaactggcacttattttctgaccatcgctgctgttgctctgtgagtcctagatttttgtagccaagcagagttgtagagggggataaaaagaaaagaaattggatgtatttacagctgtccttgaacaagtatcaatgtgtttatgaaaggaagatctaaatcagacaggagttggtctacatagtagtaatccattgttggaatggaacccttgctatagtagtgacaaagtgaaaggaaatttaggaggcataggccatttcaggcagcataagtaatctcctgtcctttggcagaagctcctttagattgggatagattccaaataaagaatctagaaataggagaagatttaattatgaggccttgaacacggattatccccaaacccttgtcatttcccccagtgagctctgatttctagactgctttgaaaatgctgtattcattttgctaacttagtatttgggtaccctgctctttggctgttctttttttggagcccttctcagtcaagtctgccggatgtctttctttacctacccctcagttttccttaaaacgcgcacacaactctagagagtgttaagaataatgttacttggttaatgtgttatttattgagtattgtttgtgctaagcattgtgttagatttaaaaaattagtggattgactccactttgttgtgttgttttcattgttgaaaataaatataactttgtattcgagtctcgtcaaaaaaaaaaaaaaaaaaaaa

SEQ ID NO: 395 - DNA, 1424 bp, Homo sapiens
  ref <308>: DATABASE ACCESSION NUMBER: NCBI / NM_005731
  ref <309>: DATABASE ENTRY DATE: 2011-11-26
  ref <313>: RELEVANT RESIDUES IN SEQ ID NO: (1)..(1424)
ctccctccgtccttgcctcccttacccaccctcaccggcccttgtttctccttcccctgggggcagccgccgccatgatcctgctggaggtgaacaaccgcatcatcgaggagacgctcgcgctcaagttcgagaacgcggccgccggaaacaaaccggaagcagtagaagtaacatttgcagatttcgatggggtcctctatcatatttcaaatcctaatggagacaaaacaaaagtgatggtcagtatttctttgaaattctacaaggaacttcaggcacatggtgctgatgagttattaaagagggtgtacgggagtttcttggtaaatccagaatcaggatacaatgtctctttgctatatgaccttgaaaatcttccggcatccaaggattccattgtgcatcaagctggcatgttgaagcgaaattgttttgcctctgtctttgaaaaatacttccaattccaagaagagggcaaggaaggagagaacagggcagttatccattatagggatgatgagaccatgtatgttgagtctaaaaaggacagagtcacagtagtcttcagcacagtgtttaaggatgacgacgatgtggtcattggaaaggtgttcatgcaggagttcaaagaaggacgcagagccagccacacagccccacaggtcctctttagccacagggaacctcctctggagctgaaagacacagacgccgctgtgggtgacaacattggctacattacctttgtgctgttccctcgtcacaccaatgccagtgctcgagacaacaccatcaacctgatccacacgttccgggactacctgcactaccacatcaagtgctctaaggcctatattcacacacgtatgcgggcgaaaacgtctgacttcctcaaggtgctgaaccgcgcacgcccagatgccgagaaaaaagaaatgaaaacaatcacggggaagacgttttcatcccgctaatcttgggaataagaggaggaagcggctggcaactgaaggctggaacacttgctactggataatcgtagcttttaatgttgcgcctcttcaggttcttaagggattctccgttttggttccattttgtacacgtttggaaaataatctgcagaaacgagctgtgcttgcaaagacttcatagttcccaagaattaaaaaaaaaaaaaaaagaattccacttgatcaacttaattccttttctttatcttccctccctcacttcccttttctcccaccctcttttccaagctgtttcgctttgcaatatattactggtaatgagttgcaggataatgcagtcataacttgttttctcctaagtatttgagttcaaaactcctgtatctaaagaaatacggttggggtcattaataaagaaaatctttctatcttaaaaaaaaaaaaaaa

SEQ ID NO: 396 - DNA, 3394 bp, Homo sapiens
  ref <308>: DATABASE ACCESSION NUMBER: NCBI / NM_020151
  ref <309>: DATABASE ENTRY DATE: 2011-12-18
  ref <313>: RELEVANT RESIDUES IN SEQ ID NO: (1)..(3394)
ccgcgcgtgtggcagtcgcggaaggcgcgggagcttgcgtgctgctgggcctgagctgtctgtctcgtttctgtccgcgcgccctgcatcccggccccgggcgcccgctggaggtcgccgaggagccacagggctgactggtctgctgcccgggcccaggagtgcctggtgtagcagtcgcggagccatcccggcgtctgctgccatgaccgactctcccctcagaggagactcttcctcagcggtggctgcagagacagatgagcggcggctcctggccgcgggaccgtgagacgggttcgtggccggccatttagggggacgctgcgaccaccgcctgcgcccctccggactggttccttgggccccggaagctcgcggcgggccctgcgggaggcggcatgctcccgcggaggctgctggccgcctggctggcggggacgcggggcgggggcctgctggcgcttctggccaatcagtgccgcttcgtcacgggcctgcgcgtgcggcgcgcgcagcagatcgcgcagctctacggccgcctctactccgagagctcacgccgcgttctcctcggccgcctctggcgccggctgcacggccgtcctggccatgcctctgccttgatggcggcgttagccggcgtcttcgtttgggacgaggagaggatccaggaggaggagttgcagagatctattaatgagatgaagcggttggaagaaatgtcaaatatgtttcagagctctggagtccagcaccaccctccagaaccaaaagcccaaacagaagggaatgaagattcagagggcaaagagcaacgttgggaaatggtgatggataagaaacactttaagctgtggcggcgcccaattacaggcacccacctttaccagtaccgagtttttggaacctacacagatgtgacacctcggcagttcttcaatgttcagctggacacagagtatagaaaaaaatgggatgccctggtaatcaagctggaggtgattgagagggatgtggttagtggttccgaggttcttcactgggtaacccattttccttatccaatgtactcacgggattatgtttatgttcggcggtatagtgtggatcaggaaaacaacatgatggtgttggtgtcgcgtgctgtggagcatccgagtgtgccagagtctccagaattcgtcagggtcagatcatatgaatcccaaatggttatccgtccccacaagtcatttgatgagaatggctttgactacttactaacatacagtgacaatccccaaacggtgtttcctcgctactgtgttagttggatggtttccagtggcatgccagatttcctggagaagctgcacatggccactctgaaagccaagaatatggagattaaagtaaaggactacatctcagctaagcctctggaaatgagtagtgaagccaaggccaccagccagtcctctgagcgaaagaacgagggcagctgtggccctgctcggattgagtatgcttgacaggctttgggataagaagggacaaggtgcttctagccctgtctcagtccgttatcactctgctgtagaagggggacatgccacatgtattagaaggcatctgctgtaacttccagtgcaagataattcaataactgatgtcccatttcattcagagcccttattgctcttatcaaaacagaagaaggctacatttgtgggagtgttgtcatattctcaggccaactgttttgaaattcggtatctcactgagctaatctggaacaaacctctcacctcaggccagaaggggatgacctccatttgcttctctgagtagtttcctctgctgacattccaaatcccaccatcgattgtgcagcgctttggatttccttcagttctccaggtccacctggaaagtatagttggccagttgagtctctcaaatgaggggctactgggagtgctcttggtaacaatcatgatgtgaatgggtgtgaacgatacttggctatgttaagtgccttgtccgcaccttgcttttatctctagagacatgaagttattattaattttttttttttttaagtagagatggagtttcactctgtttcccaggctggtcttgaactcctgggccatgcctggccagggacatgaatttgtacaaagaaatttccctccctgcctgcacaatatcacccattgactcaccttatccaaagcaagtttcctgtgaatcggccagttcttctatattcattggatcattgcctccttcctaaccttccccatttaccaagaacactgggagactaatccttttagatagtagctttttgatgctcaaaacatcacatttaaatttagtttaaaaattttttaacttttgtgtcaaataggagttgaggaattgagcaggattctaccctagtccgattgtatagaaaacaccattttgattcaggtattatttttcatatttcaggtttgacttgttcttttcagaaggctaaagtcagaggaatgggggctgggccactcccttggagctctcagatctacagacaagctgtgtgaatgcatagatgtaatcttgtctcaaatactaatacagtggagatttggtttatgttaccattaagttcctctaaaaagtttttcttcctctcttcagagccaaaataaaagtgaactacactgttcagataaggtcacaatctgatgctgtcagtttgaccgagctggttttgcttatggtcatgctgcaatttgttagaataatagggatcaagttttaaatcctcctccttcccttttttctggagtcttgagggccagagtttttgtttttgtttttgtttttgttttcctgcttgctactgttttgtggtgttgaaaagtggtttaaacctgagactaacttaaacacttccttgaccttcttgttgcctgttcatttttgtgccaaggaagtagctgccccagtgtatgtcttgccttctccgcgtcattgttggaagaggagagatgcatcgagcagtcccagctgcttttcatttattacttcttctttccaggacctgacagaagtcagggaagagtccctgggttatgtccaaacttagcacctgcaattgttgggatgtggatggatgtgtgcataagagagagagagaatatgtgtgtgtgtgtgtgcgtctgcgagcgcacacacatgcacaagtgcgaaggagttgcggttgctccatgttctgacttagggcaatttgattctgcacttggggtctgtctgtacagttactcatgtcattgtaatgatttcactcctaactgtgacatttttatcaaatgtgtgaataaatacataaagattggtacaaaaaaaaaaaaaaaaa

SEQ ID NO: 397 - DNA, 1781 bp, Homo sapiens
  ref <308>: DATABASE ACCESSION NUMBER: NCBI / NM_005103
  ref <309>: DATABASE ENTRY DATE: 2011-11-28
  ref <313>: RELEVANT RESIDUES IN SEQ ID NO: (1)..(1781)
cggggaaggggtggggtggaggcgggagcggagccgggcgccgccggagctgcgcggggagcgctcgctggctggctggctggctggctctccgctgcgctgcgctgcgctccggccgctcccgcggcccgtggatgggggtgtccggctgagccccgggatccgcctccctccgccaggacccgcacagataaactcatcctgaaagtcgctgttgttctcctgctgagcaagaatggaggccccactggtgagtctggatgaagagtttgaggaccttcgaccctcctgctcggaggacccggaggagaagccccagtgtttctatggttcatctccccaccatctcgaggacccctccctctccgagcttgagaatttttcttccgaaataatcagcttcaagtccatggaggacctcgtaaatgaatttgatgagaagctcaatgtctgctttcggaactacaacgccaagaccgagaacctagctcccgtgaagaaccagttacagatccaagaggaggaggagacccttcaggacgaggaggtttgggatgctctgacagacaattacatcccttcactctcagaagactggagggatccaaacatcgaggctctgaatggcaactgctctgacactgagatccatgagaaagaagaggaagagttcaatgagaagagtgaaaatgattccggtatcaacgaggagcctctgctcacagcagatcaggtaattgaggagattgaggaaatgatgcagaactccccagaccctgaggaagaagaggaggttctggaagaagaggatggaggagaaacttcctcccaggcagactcggtcctcctgcaggagatgcaggcattgacacagaccttcaacaacaactggtcctatgaagggctgaggcacatgtctgggtctgagctgaccgagctgctggaccaggtggagggtgccatccgtgacttctcggaggagctggtgcagcagctggcccgccgggacgagctggagtttgagaaggaagtgaagaactcctttatcacggtgcttattgaggttcagaacaagcagaaggagcagcgagaactgatgaaaaagaggcggaaagagaaagggctgagcctgcagagcagccggatagagaagggaaaccagatgcctctcaagcgcttcagcatggaaggcatctccaacattctgcagagtggcatccgccagacctttggctcctcaggaactgacaaacagtatctgaacacagtcattccttacgagaagaaagcctctcctccctcagtggaagacctgcagatgctgacaaacattctctttgccatgaaggaggataatgagaaggtgcctactttgctaacggactacattttaaaagtgctctgccctacctaaccttgccctttggagcagcctcgctgcaggaggtcactgagcaagagtcattccatcacagggactgcatgagaccatgtaacctccgacatgtatttaaacgtgtatagcttaacctggattaaacacgagcaagcgcgcggggtcctttgccgttggcttctagtgctagtaatcattggatgcatgatggggcagggccggtgatggtgcctcccccttgctggtgtcaggagaggggaaggcagccgctttcaccgctcattatgtagtctggctacagccctcaaaaacagcttatactcttaagactaattttgaaataaaaccttcatttaattaatattcttaaaaaaaaaaaaaaaaa

SEQ ID NO: 398 - DNA, 2153 bp, Homo sapiens
  ref <308>: DATABASE ACCESSION NUMBER: NCBI / NM_012179
  ref <309>: DATABASE ENTRY DATE: 2011-11-21
  ref <313>: RELEVANT RESIDUES IN SEQ ID NO: (1)..(2153)
cgaccccgagaggcccggttcctttaggccgcctgcccgcctccagctctcggggtcggctccaggaggcgccctcaggagaggggcgggcgctctattccagagaccgagtggcagggcggccactgtggcggggctctttccccgtttcgcctcagctacccctcagctccggtagtcgccagtccggggtcgtcgccgtttggggcgggagctgctcggccccgccgccgtccccgtcgccgcttccgggtccaggcccctcgggccgcctgccgccgtcatgaggctgcgggtgcggcttctgaagcggacctggccgctggaggtgcccgagacggagccgacgctggggcatttgcgctcgcacctgaggcagtccctgctgtgcacctgggggtacagttctaatacccgatttacaattacattgaactacaaggatcccctcactggagatgaagagaccttggcttcatatgggattgtttctggggacttgatatgtttgattcttcaagatgacattccagcgcctaatataccttcatccacagattcagagcattcttcactccagaataatgagcaaccctctttggccaccagctccaatcagactagcatgcaggatgaacaaccaagtgattcattccaaggacaggcagcccagtctggtgtttggaatgacgacagtatgttagggcctagtcaaaattttgaagctgagtcaattcaagataatgcgcatatggcagagggcacaggtttctatccctcagaacccatgctctgtagtgaatcggtggaagggcaagtgccacattcattagagaccttgtatcaatcagctgactgttctgatgccaatgatgccttgatagtgttgatacatcttctcatgttggagtcaggttacatacctcagggcaccgaagccaaagcactgtccatgccggagaagtggaagttgagcggggtgtataagctgcagtacatgcatcctctctgcgagggcagctccgctactctcacctgtgtgcctttgggaaacctgattgttgtaaatgctacactaaaaatcaacaatgagattagaagtgtgaaaagattgcagctgctaccagaatcttttatttgcaaagagaaactaggggaaaatgtagccaacatatacaaagatcttcagaaactctctcgcctctttaaagaccagctggtgtatcctcttctggcttttacccgacaagcactgaacctaccagatgtatttgggttggtcgtcctcccattggaactgaaactacggatcttccgacttctggatgttcgttccgtcttgtctttgtctgcggtttgtcgtgacctctttactgcttcaaatgacccactcctgtggaggtttttatatctgcgtgattttcgagacaatactgtcagagttcaagacacagattggaaagaactgtacaggaagaggcacatacaaagaaaagaatccccgaaagggcggtttgtgatgctcctgccatcgtcaactcacaccattccattctatcccaaccccttgcaccctaggccatttcctagctcccgccttcctccaggaattatcgggggtgaatatgaccaaagaccaacacttccctatgttggagacccaatcagttcactcattcctggtcctggggagacgcccagccagtttcctccactgagaccacgctttgatccagttggcccacttccaggacctaaccccatcttgccagggcgaggcggccccaatgacagatttccctttagacccagcaggggtcggccaactgatggccggctgtcattcatgtgattgatttgtaatttcatttctggagctccatttgtttttgtttctaaactacagatgtcaactccttggggtgctgatctcgagtgttattttctgattgtggtgttgagagttgcactcccagaaaccttttaagagatacatttatagccctaggggtggtatgacccaaaggttcctctgtgacaaggttggccttgggaatagttggctgccaatctccctgctcttggttctcctctagattgaagtttgttttctgatgctgttcttaccagattaaaaaaaagtgtaaattaca

SEQ ID NO: 399 - DNA, 2089 bp, Homo sapiens
  ref <308>: DATABASE ACCESSION NUMBER: NCBI / NM_020360
  ref <309>: DATABASE ENTRY DATE: 2011-12-24
  ref <313>: RELEVANT RESIDUES IN SEQ ID NO: (1)..(2089)
gggccagcgcggcccgggccgccctcgcctcccacccagggcgctgagcacgcacgccgccggcctggcggcgttcgcggggcccgggaccagccgccgccttctccaggcgctcctactctctgggcatctgcagtccgagcggaaggggcgggaacgtcggcgacgccgaggagcaaagcccacgatcggcttcccggggcagcggacggctgccttcctcccggcgcaaacgcaccgcccaggagggggcgggctcggcgggtcggggggcggggccggggtccgagctcgggcccgcctccgcctccgccagctcctgtgagctgccgagtgctaggcacccgggctcttctgggggctccagaggcgccgcccaagagaccctgggccggcgccgggcgcagctgcctctccgtctttgtgtctgtctctgtgtctgtctggctatctccgagtttgcctccgcttccagaactaagccacccagacaccatcatctcgaaaaccccagcccttctcccatggcaggctacttgccccccaaaggctacgccccttcgcccccacctccctaccctgtcacccctgggtacccggagccggcgctacatcctgggcccgggcaggcgccagtgcccgcccaggtacctgccccagctcccggcttcgccctcttcccctcgcctggccccgtggccttggggtctgctgcccccttcttgccactgccaggggtgccttctggcctcgaattcctggtgcagattgatcagattttgattcaccagaaggctgagcgagtggaaacgttcctaggctgggagacctgtaatcggtatgaactgcgctctggggccgggcagcccctgggtcaggcggccgaggagagcaactgctgcgcccgtctgtgctgtggcgcccgccggccgctgcgtgtccgcctggccgaccccggggaccgtgaggtgctgcgtttgctccgcccgctgcactgtggctgcagctgctgcccctgtggcctccaggagatggaagtacaggctccaccaggcaccaccattggccacgtgctacagacctggcatcccttcctccccaagttctccatccaggatgccgatcgccagacagtcttgcgagtggtggggccctgctggacctgtggctgtggcacagacaccaactttgaggtgaagactcgggatgaatcccgcagtgtgggccgcatcagcaagcagtgggggggcctggtccgagaagccctcacagatgcagatgactttggcctacagttcccgctggacctggatgtgagggtgaaggctgtgctgctgggagccacattcctcattgactacatgttctttgagaagcgaggaggcgctgggccctctgccgtcaccagttagaggccaccatggtgtgaggagaccatcacctcgaccagaactccagatggtcacctgccctggcccctcctctgggcagcccctttcctccatgtacactgcaggggacagaaggggggccccatccctaccctactccctggccgcctgcccctgtggttcccaaggaggggtatgtatgagagccgctctcctgctacctcccaccactgtcccagcagtccctcggcacacaggcatatcagctttcacactttccccatgcactctctcccacccccttccagggcctctgctccaaaggaggcctctggaacccaggactctggggttttacaagagggctggggtgtggaagggcaagctgcaccaaagacggtggatatagccaccgcccccccgccgctgcctagcatctgcttggccaattagttcagcctcagaccatggcactttgagggggtctctacctccccatcaacagctgcagggggaccccagtgccaacttcctctcccactagggccctgccttcagctggtgcttgctgcgattcctgtgccttatgtaactgcccttccttcccttgccctaggaaaaaggctgcatctttatatgttacattcatataaactttgtaactttttggacattgaaaaaaaaaaaaaaaaaaaaaa

SEQ ID NO: 400 - DNA, 2707 bp, Homo sapiens
  ref <308>: DATABASE ACCESSION NUMBER: NCBI / NM_014891
  ref <309>: DATABASE ENTRY DATE: 2011-12-19
  ref <313>: RELEVANT RESIDUES IN SEQ ID NO: (1)..(2707)
ggtccttgcggccactgcggccactgaagcggcggcggcggctggcccaggaggaagaagtcgagcccaagctatttccggttccggtgtcagttcgaggcgccgccgccgccgccgcagccgccggagccgcaatgcctaaaggaggaagaaagggaggccacaaaggccgggcgaggcagtatacaagccctgaggagatcgacgcgcagctgcaggctgagaagcagaaggccagggaagaagaggagcaaaaagaaggtggagatggggctgcaggtgaccccaaaaaggagaagaaatctctagactcagatgagagtgaggatgaagaagatgactaccagcaaaagcgcaaaggcgttgaagggctcatcgacatcgagaaccccaaccgggtggcacagacaaccaaaaaggtcacacaactggatctggacgggccaaaggagctttcgaggagagaacgagaagagattgagaagcagaaggcaaaagagcgttacatgaaaatgcacttggccgggaagacagagcaagccaaggctgacctggcccggctggccatcatccggaaacagcgggaggaggctgcccggaagaaggaagaggaaaggaaagcaaaagacgatgccacattgtcaggaaaacgaatgcagtcactctccctgaataagtaactgcgacccgtgggaggagatgccggggacctgggccgcgctgccaggacctctgctgtgtctcgcccaccctgtgccctggcgccgctgcaacagcccctcatggccaggagccccccatggcctggggcctcctcttcatcttggcacagaaattgtttgggggatggggggggggactgggggaggggtagctgctatctttgagacagaaagatgcaggacagcatttcatatgtaaccatttgaatgtttttgctgtttttagaattcagagcccttgctggggggtgcctgggagatggggtaagaagagctttcatttgtctggtagatagatagcatgtaagggggtggttgtcccaggaggcagctgctgacaggtttgctacacacagccccggactgtgttgcctgggtgctcattcagagaggggctatcatctgggagcctgtgcccctgggtcctcgagggtcatggcttgtccctggtcagtcctgtctgactgacctcagggcctcacctctctgcccttccctgcccggttcctactcacctggctagggccagtgcccattttcagccctacccattgatcatttcaagaaacctctgtttactgtgtggcacccaggcaaaacatgctccacaaattcaacttgtatatttggcagattaaacttgacattatcgtaatctttgttttggcaatccatcctttggcttccgtgctcgagccgtttttacccagctgggtacggtgccacgttcaggcacgtgcacccggcaaggttcagggcacatacctacctggggcatgacatctgtcaggtggcaccgagcaggatgcggggatggaccctagataccacagcctgccccctcccctcctttagccaagtcaggatcttaggcctcagcaggcagggacccttccaggccacagtaggctgaagcagcaccaggatcctggcctggcctggcctgtaggtgtcccctggtggttataattctgtaactctaggggagaaggggaatagcactagcattggatgtcgccaaggcccacattttcctgagagaagccacaaaagatgtgcaaatgcccttcagcacaggacctggtgacatgacataaactccaagacagaacctcagtttacagcacacgaaaaaaatatcttgccaacattgtaatgacaaaataaattcccgtgaagttccacaaccaggccgggcatggtggctcatgcctgtaatcccagcactttgggaggtgaggtgggtggatcatctgaggtcaggagttcaagaccagcctggccaacatggagaaactccgtctctactaaaaatacaaaaattaaccaggcttggtggtgtatgcctgtaatcccagctacttgggaggctgaggcaggagaatcgcttgatcccaggaaggcagaggtggcagtgagctgagaacgcacaactgcactccagcctgggtgacgagcaaaactccatctcaaaacaaaagttccacaaccagcctggagtgtgtagcccctttgtccaggaatttgactagtcaatcagtgacacctggtactggcagttttgggagtggcagcccaggatggacagcagtggggagggaaccatttggcataaggccgttgggcttcaggatcaattttgttggcaagcagtaaaaataagctatctacctatggccgtgcaaacaccaatctctccctggagtcccagctacttgggaggctgaggcagaaggattgctcccacgagttctagtgcagcctggaaaacttagcaagaccccaaggaaataacaaaaaacctctccttccacataggcaagcatgtccataattacttttttttttttttttttttttacacagttgcattttattacctccacattttgaagcagttcatgaccagcatagtgctttgggggcattttttttttttttcaataaatgaaagcatttaagaaaaaaaaaaaaaaaaaaaaaaa

SEQ ID NO: 401 - DNA, 1417 bp, Homo sapiens
  ref <308>: DATABASE ACCESSION NUMBER: NCBI / NM_005745
  ref <309>: DATABASE ENTRY DATE: 2011-12-25
  ref <313>: RELEVANT RESIDUES IN SEQ ID NO: (1)..(1417)
gagagttctgttgctgcggcggggcctgcacgttgactgtgggaaactcggtgagcgggctccgcgcgccgggctgggctccgggaccgcggaggctccccggcccatcgacgagggagagaggcgagcggcgcggggaggcccgggggccggggaatctcggggcccgcagcctacctgcgtgaaacaagctcacatcttcctgtgggaaaccttctagcaacaggatgagtctgcagtggactgcagttgccaccttcctctatgcggaggtctttgttgtgttgcttctctgcattcccttcatttctcctaaaagatggcagaagattttcaagtcccggctggtggagttgttagtgtcctatggcaacaccttctttgtggttctcattgtcatccttgtgctgttggtcatcgatgccgtgcgcgaaattcggaagtatgatgatgtgacggaaaaggtgaacctccagaacaatcccggggccatggagcacttccacatgaagcttttccgtgcccagaggaatctctacattgctggcttttccttgctgctgtccttcctgcttagacgcctggtgactctcatttcgcagcaggccacgctgctggcctccaatgaagcctttaaaaagcaggcggagagtgctagtgaggcggccaagaagtacatggaggagaatgaccagctcaagaagggagctgctgttgacggaggcaagttggatgtcgggaatgctgaggtgaagttggaggaagagaacaggagcctgaaggctgacctgcagaagctaaaggacgagctggccagcactaagcaaaaactagagaaagctgaaaaccaggttctggccatgcggaagcagtctgagggcctcaccaaggagtacgaccgcttgctggaggagcacgcaaagctgcaggctgcagtagatggtcccatggacaagaaggaagagtaagggcctccttcctcccctgcctgcagctggcttccacctggcacgtgcctgctgcttcctgagagcccggcctctccctccagtacttctgtttgtgcccttctgcttcccccattcccttccacagctcatagctcgtcatctcggcccttgtccacactctccaagcacattacaggggacctgattgctacacgttcagaatgcgtttgctgtcatcctgcttggcctggccaggcctggcacagccttggcttccacgcctgagcgtggagagcacgagttagttgtagtccggcttgcggtggggctgacttcctgttggtttgagcccctttttgttttgccctctgggtgttttctttggtcccgcaggagggtgggtggagcaggtggactggagtttctcttgagggcaataaaagttgtcatggtgtgtacgtggaaaa

SEQ ID NO: 402 - DNA, 4571 bp, Homo sapiens
  ref <308>: DATABASE ACCESSION NUMBER: NCBI / NM_005418
  ref <309>: DATABASE ENTRY DATE: 2011-12-17
  ref <313>: RELEVANT RESIDUES IN SEQ ID NO: (1)..(4571)
gggggtcgggggtcgggggctgggggctgaggactgagtcgagccagcagcccagggcatctgtccacgctgtcagaggagcctctgggcgtggggctggcccttagagggctactgcgctgcttaacttgcctttcacagaaaaccactggaggagatactcacaaaaatgaaggggaagaacaggaaacaggaagacatgagatgaaggaaacaggagattcaacatggatttcacaccctttggagagtttctttcttggataattcaggaagatgagagactgcttaggcgccaccactagtaccatgagtccctgcactggttaaagccatcgccacaacctggacaggcagcaagggctctgggtttgcagagagccgaaatgaccatgactgccaacaagaattccagcatcacccacggagctggtggcactaaagcccctcgggggactctgagcaggtctcagtcagtctctccacctccagttctctccccaccaaggagtcccatctacccgctcagtgatagtgaaacctcagcctgcaggtaccccagccactccagctcccgggtgctcctcaaggaccggcaccccccagctccttcaccccagaatcctcaagatccctccccagatacttccccacccacctgtcccttcaagaccgccagcttcggttatttggacagaagcccttcggcgtgcaagagagacgcccaaaaggaaagtgtccaaggcgcagcccaggatgtagcaggggtcgctgcctgcctcccccttgcccagagcacgccattcccggggccagcagctggcccccggggcgtcttgctgacccgtaccggtacccgcgcccacagcctgggcatccgggagaagatatcagcatgggaaggtcgccgagaggcgtcgcccaggatgagcatgtgtggagagaagcgggagggctctgggagcgagtgggcggccagtgagggctgccccagcctgggctgtcccagcgtggtgccgtccccctgcagctctgaaaagacctttgatttcaagggcctccggaggatgagcaggaccttctccgagtgttcctacccagagactgaggaggagggagaggcgctccctgtccgggactctttctaccggctggagaaacggctgggccggagtgagcccagcgccttcctcagggggcatggcagcaggaaggagagctcagcagtgctgagccggatccagaaaattgaacaggtcctgaaggagcagccgggccgggggctcccccagctccccagcagctgctacagcgtggaccgggggaaaaggaagactggaaccttgggctccttggaggagccggcagggggcgcgagtgtgagcgctggcagccgggcagtcggagtggctggtgttgcgggggaggcgggcccacccccagagagggaaggcagtggttccactaagcccgggacccctggaaatagccctagctcccagcggctgccatcgaagagttccctcgatcccgctgtgaaccctgtccccaaacccaagcgcacctttgaatacgaggctgacaagaaccccaagagtaagcccagtaatggtctacctccttcacccacacctgctgctccacctcccttgccctccaccccagccccgccagtcacccggagacccaagaaggacatgcgtggtcaccgcaagtcccagagcagaaaatcctttgagtttgaggatgcatccagtctccagtccctgtacccctcttctcccactgagaatggtactgagaaccaacccaagtttggatccaaaagcactttagaagaaaatgcctatgaagatattgtgggagatctgcccaaggagaatccatatgaggatgtggacttaaagagccgaagagcaggacgaaaatcccagcaactgtctgagaactccttggactctttgcacaggatgtggagtcctcaggacaggaagtacaacagcccgcccacacagctttccctgaaacccaacagccagtccctgcgcagtgggaactggtcagaaaggaagagccaccggctgccacgattacccaagaggcacagccatgacgacatgctgctgctggctcagctgagtctgccgtcctcaccctccagcctcaatgaagacagcctcagcaccaccagcgagctgctgtccagccgccgggcccgccgcattcccaagcttgtccaaagaattaactccatctacaatgccaagagaggaaagaagagattaaaaaagttgtctatgtccagcattgaaacagcatcactgagagatgaaaacagtgagagcgagagcgactctgatgacaggttcaaagcccacacacagcgcctggtccacatccagtcgatgctgaagcgcgcccccagctatcgcacgctggagctggagctgctggagtggcaggagcgggagctttttgagtactttgtggtggtgtccctcaagaagaagccatcgcgaaacacctacctccccgaagtctcctaccagtttcccaagctggaccgacccaccaagcagatgcgagaggcagaggaaaggctcaaagccattccccagttttgcttccctgatgccaaggactggcttcctgtgtcagagtatagcagtgagaccttttctttcatgctgactggggaagatggcagcagacgctttggctactgcaggcgcttactgccaagtgggaaagggccccggttgccagaggtgtactgtgtcatcagccgccttggctgcttcggcttgttttccaaggtcctagatgaggtggagcgccggcgtgggatctccgctgcattggtctatcctttcatgagaagtctcatggagtcgcccttcccagccccagggaagaccatcaaagtgaagacattcctgccaggtgctggcaatgaggtgttagagctgcggcggcccatggactcaaggctggagcacgtggactttgagtgcctttttacctgcctcagtgtgcgccagctcatccgaatctttgcctcactgctgctggagcgccgggtcatttttgtggcagataagctcagtaccctctccagctgctcccacgcggtggtggccttgctctaccccttctcctggcagcacaccttcattcctgtcctcccggcctccatgattgacatcgtctgctgtcccacccccttcctggttggcctgctctccagctccctccccaaactgaaggagctgcctgtggaggaggcgctgatggtgaatctgggatctgaccgattcatccgacagatggacgacgaagacacgttgttacctaggaagttacaggcagctctggagcaggctctggagaggaagaatgagctgatctcccaggactctgacagcgactccgacgatgaatgtaataccctcaatgggctggtgtcggaggtgtttatccggttctttgtggagaccgttgggcactactccctctttctgacacagagtgagaagggagagagggcctttcagcgagaggccttccgcaaatctgtggcctccaaaagcatccgccgctttcttgaggtttttatggagtctcagatgtttgctggcttcatccaagacagggagctaagaaagtgtcgggcaaagggcctttttgagcagcgagtggagcagtacttagaagaactcccagacactgagcagagtggaatgaataagtttctccgaggtttgggcaacaaaatgaagtttctccacaagaagaattaagcctccttctcagtagcagagtccagtgccttgcagagcctgaagcctggggagaaggcccagcctgggaccctctgggctgctgtggctcctctgcccccacagatcctatcctccaagccagcccacctctgccttcatcatatcccaggatactgtttgtaaataatctgctgtaagctttcttaactgttttttgtaacaagcaaagagaatatggcaaatatttgtatattcccaaggggccgggtgctttcctgtcctgccagagcatggatgaagtttcgctgggtgctcgtgactggccagttttgtgcagctgactgtctcagccaaaccactgatcttccctggaggccttcggcctgcctgcctgcctgaggtccccgctgccagtcccgggccctggagagcagatgctgtcttgttatgtacaggaggaccttttaaaaaaatcaagtttctattttttgctggtagtccgcatacccataccctctgtttttgaaaggcaaaggccaatcagtccccatttgtagcatggcaccagggtcttaggcctagtcctctcattcctcccaccctccgagatggtcagtgtgtcatgggaagcccacccccagctctgccagtgctctctgggcctggctcccagtcagtggtggccacgatgcggtacagggcatccctccttcccatctacgggtgttctcaataaacaatgtacagttgtttgggcccagaaaaaaaaaaaaaaaaaaaaaaaaaaaa

SEQ ID NO: 403 - DNA, 1833 bp, Homo sapiens
  ref <308>: DATABASE ACCESSION NUMBER: NCBI / NM_006262
  ref <309>: DATABASE ENTRY DATE: 2011-02-17
  ref <313>: RELEVANT RESIDUES IN SEQ ID NO: (1)..(1833)
cctcgcagcggtctgcggctccttcccagcccccggcctagctctgcgaacggtgactgcccatccttggccgcaatgagccaccacccgtcgggcctccgggccggcttcagctccacctcataccgccgtaccttcggtccaccgccctcactatcccccggggccttctcctactcgtccagctcccgcttctccagcagccgcctgctgggctccgcgtccccgagctcctcggtgcgcctgggcagcttccgtagcccccgagcgggagcgggcgccctcctgcgcctgccctcggagcgcctcgacttctccatggccgaggccctcaaccaggagttcctggccacgcgcagcaacgagaagcaggagctgcaggagctcaacgaccgcttcgccaacttcatcgagaaggtacgctttctggagcagcagaacgcggccctgcgcggggagctgagccaagcccggggccaggagccggcgcgcgccgaccagctgtgccagcaggagctgcgcgagctgcggcgagagctggagctgttgggccgcgagcgtgaccgggtgcaggtggagcgcgacgggctggcggaggacctggcggcgctcaagcagaggttggaggaggagacgcgcaagcgggaggacgcggagcacaacctcgtgctcttccgcaaggacgtggacgatgccactctgtcccgcctggaactagagcgcaagattgagtctctgatggatgagattgagttcctcaagaagctgcacgaggaggagctgcgagacctgcaggtgagtgtggagagccagcaggtgcagcaggtggaggtggaagccacggtgaagcccgagctgacggcagcgctgagggacatccgcgcgcagtacgagagcatcgccgcgaagaacctgcaggaggcggaggagtggtacaagtccaagtacgcggacctgtccgacgctgccaaccggaaccacgaggccctgcgccaggccaagcaggagatgaacgagtcccgacgccagatccagagtctaacgtgcgaggtggacgggctgcgcggcacgaacgaggcgctgctcaggcagttgagagagctggaggagcagttcgccctggaggcggggggctaccaggcgggcgctgcgcggctcgaggaggagctgcgacagctaaaagaggagatggcgcggcacctgagggagtaccaggagctcctcaacgtcaagatggccctggacatcgagatcgccacctaccgcaagctgctggagggcgaggagagccggatctccgtgcccgtccattcttttgcctccttaaatataaagacgactgtgcctgaggtggagcctccccaggacagccacagccggaagacggttctgatcaagaccattgagacccggaatggggaggtggtgacagagtcccagaaggagcagcgcagtgagctggacaagtcttctgcccacagttactgaaccccttggtccggagccttgactctgccctaggcctgctcaaagcccaaaccctaagaccactcctgaattgtctcctctccctctgcatgtgtctaaaaggtggtaccaggcatccctttcctggcttatggccaagccctacccggccagcagtcgctgggcctctccctgccctgacacttgatgtgacctatgtgcttcccttttcatgtcccgataagaagccaatgatcccccctcaggacaaatctactccagccacgatgagaagtgggtgagccagggtctgagtttcacatttgaaccaaataaaatgctgtcaagagaaaactctccagtgca

SEQ ID NO: 404 - DNA, 3141 bp, Homo sapiens
  ref <308>: DATABASE ACCESSION NUMBER: NCBI / NM_133476
  ref <309>: DATABASE ENTRY DATE: 2011-08-15
  ref <313>: RELEVANT RESIDUES IN SEQ ID NO: (1)..(3141)
acttccgggtgagtgcaaggggagggcagcaaggagggggggccacccactacctcgcgcccccgccctgcgggtgtctcgcgcgcgttccgtgcgtgtgagtgtgtgggtctgtctcgctccagaagtgcgtgcccgcgcgctgcgccttgcgctttttcccctccctcgccccttcctggtcctcccaccctcctcggctccctcctttcccagcaaacgccgcccctcccgcgccctggctcaggctctggcgccgccgcagccgtcgccgcccgaaagttcaggagccctggaaaggagaaggaataagacggcaggaggaagagagagagagggtagaatggaagaatctcacttcaattctaacccgtacttctggccttctatccccacagtctcaggtcagatcgagaacacaatgttcatcaacaagatgaaggatcagctgttgccagagaagggctgtggtctggccccacctcactaccccaccttgctgacagtgcctgcctcagtgtccctgccctcaggcatcagtatggacacagagtccaagtcagaccagctgaccccacacagccaagcgtccgttacccagaatatcacggtggtccctgtgccgtctacaggactgatgactgctggagtctcctgttctcagaggtggagaagagaagggagtcaatcaaggggtccgggtttggtaatcacgtccccctcaggctctcttgtgaccacagcatcatcagctcagaccttccccatttcggctcccatgattgtctcagctcttccccctggctcacaagccctgcaggttgtccctgacctctccaagaaggtagcatcgaccctaaccgaggaaggaggcggaggtggtggtggaggtggcagtgtggctcctaagccaccccggggccggaagaagaagcggatgctggaatcagggctgcccgagatgaatgacccttatgtcctctcccctgaggatgatgatgaccatcagaaagacggcaagacctacaggtgccggatgtgctcactgacattctactccaagtcggagatgcagatccactccaagtcacacaccgagaccaagccccacaagtgcccacattgctccaagaccttcgccaacagctcctacctggcccagcacatccgtatacactcaggggctaagccctacagttgtaacttctgtgagaaatccttccgccagctctcccaccttcagcagcacacccgaatccacactggtgatagaccatacaaatgtgcacacccaggctgtgagaaagccttcacacaactctccaatctgcagtcccacagacggcaacacaacaaagataaacccttcaagtgccacaactgtcatcgggcgtacacggatgcagcctcactagaggtgcacctgtctacgcacacagtgaagcatgccaaggtgtacacctgcactatctgcagtcgggcatacacatcagaaacataccttatgaaacatatgcgcaaacacaacccgcctgatcttcagcaacaggtgcaggcagcagcagcagcggcagcagtggcccaggcccaggctcaagctcaagcccaggctcaggctcaggctcaagcccaggcccaggcccaggcctcccaggcatcacagcagcagcagcagcagcagcagcagcagcagcagcagcagcaacagccaccaccacacttccagtctcctggggcagccccccagggtgggggtggtggggacagcaatcccaaccctccaccccagtgttcctttgacctgaccccgtataagacggcggagcatcataaggacatctgcctcactgtcaccaccagcaccatccaggtggagcacctggccagctcttagagatccgtgctgccacccactgggaagaggaagaagtagtcctggtgtcttctttctccaactcttggtgggaaaagtccttttcttccttgacaggccttggctccatctccttgggcctctgtcacggctttccttcacaggataccatcctttttctgaactcttcttcaaaaggaacatcagccctcctgattgcaaaggaatactgagctgatggtgtcatccagcagcctcccctcccaagcaaagcttctaaaactgggggtcggtgctcaagggaaggatttgctatgacctcatagaaccttgtccagtgtggccacttaccctatccttaccctccttatcctcaaagtttgggctgatgtaagactagaggctggccctcccagataacagagaaaagggagccccaaatgcaaccagcctcttgttctattcttgcctgcaaaagaacagaggtttctcaaatgcctcagtccctgagagccatttcttcccctacatcgtctcactttgcttcctattgactgctggtagaaggagatttggggtaggggctagacctccttttatttgaagggggcaagggctgagatgtggtccccaaggggccagaaattcccaagttggtcacaggtggcttagaagtgtgtgttatggttttacggatttccttgaagcctctctccttctctgcctacaaagaccctatactctcagtctccccaacccacccccaaggagctgtgggaggctttgtgttatctgtgaaactccaaaacaggggtgttgcggagaagggagagttcaaggcaaacgcaaggactggacttagctccctaggtgccacagtcagatgccggacacggatttatatataaatatatatatataaatatattatactcactcatcacggccatctttgttgtaaccatttctgtgtttataaatgcattatctctgagaattttcatatttgatgttttgtttatttttgtcctttttttccctctctccacccctgtcctctagccacagcatttttctttttgtcttttttttttttttttaaatcatggcagatttcagaggaaaggaaattaaaaaaaaaatcaggaaaccagttgttataaagtaatttaaaaatgaagaaaaaaagaaaaaaacttatgtacaaaccaaggggtgtttttagaacattgtatagaaataaattcatgtaaaaggaaaaaaaaaaa

SEQ ID NO: 405 - DNA, 1657 bp, Homo sapiens
  ref <308>: DATABASE ACCESSION NUMBER: NCBI / NM_006570
  ref <309>: DATABASE ENTRY DATE: 2010-11-05
  ref <313>: RELEVANT RESIDUES IN SEQ ID NO: (1)..(1657)
cgccggaagtgggtggtggcggggacgcagcggctccctcccggaaagcgagcgtatctcccgagccgttgccactgacagccgcgggcgctcccatctgagtaagagccagcccgtccgcggcctctccagccccgggttcgcgctctcgactctcctgcctgcccagctgcgcggcggagcggagcgaggcgcggcctgcgagtccccggcagcccccgacccctccctcggcgctgcgtgtaggccgcgccctcaggcccagtccgcggtgccccggcgggtgatgccaaatacagccatgaagaaaaaggtgctgctgatggggaagagcgggtcggggaagaccagcatgaggtcgataatcttcgccaattacattgctcgcgacacccggcgcctgggggccaccattgacgtggaacactcccacgtccgattcctagggaacctggtgctgaacctgtgggactgtggcggtcaggacaccttcatggaaaattacttcaccagccagcgagacaatatcttccgtaacgtggaagttttgatttacgtgtttgacgtggagagccgcgaactggaaaaggacatgcattattaccagtcgtgtctggaggccatcctccagaactctcctgacgccaaaatcttctgcctggtgcacaaaatggatctggttcaggaggatcagcgtgacctgatttttaaagagcgagaggaagacctgaggcgtctgtctcgcccgctggagtgtgcttgttttcgaacgtccatctgggatgagacgctctacaaagcctggtccagcatcgtctaccagctgattcccaacgttcagcagctggagatgaacctcaggaattttgcccaaatcattgaggccgatgaagttctgctgttcgaaagagctacattcttggttatttcccactaccagtgcaaagagcagcgcgacgtccaccggtttgagaagatcagcaacatcatcaaacagttcaagctgagctgcagtaaattggccgcttccttccagagcatggaagttaggaattccaacttcgctgctttcatcgacatcttcacctcaaatacgtacgtgatggtggtcatgtcagatccgtcgatcccttctgcggccactctgatcaacattcgcaatgcccggaaacactttgagaagctggagagagtggatggccccaagcacagtctccttatgcgttgaatattgccaaatgctctttctgaaaatgctgaattgccttttttgtttgcatcctttatttttaatattcataatgtcgtgtgcttaaaagtgggctttgaagtgtgtgctgcttactcctttcatctttctccccgcttccccagtctttaaacattggacgctatttactcagctacccagtagagcttgaagctgacctttctgagaagttggtatggtgtaacactaaagtaggtggttcgtgtgtgttctcattacctggttatgatagatatgcacatcaaagcctttaccagtatcttcctgtattccgtatcagattgcaaagacggaatgttactattttatcagcaaggtattaaaatgcatttataaattcttcttggcttcattcatgaataaacgtgttagcaatttaaaaaaaaa

SEQ ID NO: 406 - DNA, 1207 bp, Homo sapiens
  ref <308>: DATABASE ACCESSION NUMBER: NCBI / NM_006333
  ref <309>: DATABASE ENTRY DATE: 2011-11-27
  ref <313>: RELEVANT RESIDUES IN SEQ ID NO: (1)..(1207)
agagccggcgcgtcattgtcgtcatcgttgcccgaccgctttccgggagactggagtcgaaggccgtgaggtatttttctaagtcagccataatggcaggtgaagaaattaatgaagactatccagtagaaattcacgagtatttgtcagcgtttgagaattccattggtgctgtggatgagatgctgaagaccatgatgtctgtttctagaaatgagttgttgcagaagttggatccacttgaacaagcaaaagtggatttggtttctgcatacacattaaattcaatgttttgggtttatttggcaacccaaggagttaatcctaaggaacatccagtaaaacaggaattggaaagaatcagagtatatatgaacagagtcaaggaaataacagacaagaaaaaggctggcaagctggacagaggtgcagcttcaagatttgtaaaaaatgccctctgggaaccaaaatcgaaaaatgcatcaaaagttgccaataaaggaaaaagtaaaagttaactttttggttttgatgtacacatattcaaaaagtacatcttcccccccccccccccccccgcaaaataattctgtggcagggcaaggtttaaatgtgtttcttattaatatgtaaattcacagtaaatatgtaaagctaaatactttcctctccaaagatcattatctttattgattagcactgaggattttaacattgtgatatattatatatttataatttaccatctcttgatgagactcttatttctttatataggtcagtcttgcaagtaccattttataagcagctgtgaaatttaagtgaaatgttctttgtaaacatttgtactattttaaatgaataatgaccttatgaagtatgctatctgtaggctgaaattataggtacatctgttttcactatatgatattaagaaagcgtgaaatgacttaaatgttcatttttttctgtatagatactttatcatgttttcatgattttaggaattactgctttgttgatattcaaagtgtgaaactaaaactttatggttgtactttaattcttggcatgttgcctctatgtcccatttaaaataaaatacattctcattaactttagatgggaaataaggttgtatgttgatggatgaattttggcatgatgactgtactctcaataaaggctgaaaatgttgtataactga

SEQ ID NO: 407 - DNA, 1031 bp, Homo sapiens
  ref <308>: DATABASE ACCESSION NUMBER: NCBI / NM_007285
  ref <309>: DATABASE ENTRY DATE: 2011-12-25
  ref <313>: RELEVANT RESIDUES IN SEQ ID NO: (1)..(1031)
cgacagccggaagtcccgcctgccgtgtagtcgccgccgtcgctgccgctgccgctgccgccgtcgttgttgttgtgctcggtgcgctgagctccgcggctccgcgagccggttccgtccccttcccgccgccgccatgaagtggatgttcaaggaggaccactcgctggaacacagatgcgtggagtccgcgaagattcgagcgaaatatcccgacagggttccggtgattgtggaaaaggtctcaggctctcagattgttgacattgacaaacggaagtacttggttccatctgatatcactgtggctcagttcatgtggatcatcaggaaaaggatccagcttccttctgaaaaggcgatcttcctgtttgtggataagacagtcccacagtccagcctaactatgggacagctttacgagaaggaaaaagatgaagatggattcttatatgtggcctacagcggagagaacacttttggcttctgagggccattgctgggctaggtgcaccgtaactgcttgtgtatcttgtaaatagccagccattttcagttattataccagaacctcttcacatagacctattagtgcatttgtaactggatttatttcttaatatattggaaggttttgtttccttagactagtaaattatcatacagagttttattttgagtttttctttttgtgcattgtcctcatgcctgtattctccaggaaacttgtccttctggaaatcatattgaatgatatttctatatcgaagtgaggtaggtgcggtattaaagtgaaagggaaggtgatgcatttattctgggttatgcttgaagtgttagatggctaagtattaaaattatccaaattaaatccttagcagtcagaacacttgcttcactagaatatgccaactgccaatcatgttggactgagctaatttgttcctctttctgaaactattaaggtaaataattaacaataaaaattctcttataaaggcaaaaaaaaaaaaaaaaaaaaaaaaaaaaaa

SEQ ID NO: 408 - DNA, 2245 bp, Homo sapiens
  ref <308>: DATABASE ACCESSION NUMBER: NCBI / NM_006354
  ref <309>: DATABASE ENTRY DATE: 2011-11-20
  ref <313>: RELEVANT RESIDUES IN SEQ ID NO: (1)..(2245)
gtacccccatcctttctctcgcccctcctacccgcagctcctggcgctcggcggggctaactgcagcgcggagatctcggccgccaagctccgcctcccgccccgggctgtgccccggggctcgcctgaggccgaccacccgcaccccacctctagcggctttgctcgaggcccaccttcttcccacccccggcaaactccagtaggctcgccctcgctgactccccgcccccgcgtcaactgcaaggggcccgcccatagccagttccggggcggttgctcacatcgaccggaactccccgccccctcccgcggcccctggggccgtaggaggccgcagcgaggaggtagagggggcgggggtcgcactagggtgtccctagagaacgaggactctgaaggcgggacatttgggcgacccccgggcggggccagccattaaacagtcccacttctgtgccagacactgaactgggctcttgacgggcatcatctcttaatcctcagaacatcccagggagctccacaggatccccatatcctgggccatgagtgagttgaaagactgccccttgcagttccacgacttcaagtctgtggatcacctgaaggtctgtccccgctacacggcagtgctggcacgctctgaggatgatggcatcggcatcgaggagctggacaccctgcagctggagctggagaccctgctgtcttctgccagccggcgcctgcgtgtgcttgaggccgaaacccagatcctcaccgactggcaggataagaaaggtgacagacgattcctgaagctgggtcgagaccatgaacttggagctccccccaaacatgggaagcccaagaagcagaaactggaagggaaggcaggacatgggccgggccctggcccaggacggcccaaatccaaaaaccttcagcccaagatccaggaatatgaattcactgatgaccctatcgacgtgccacggatccccaaaaatgatgcccccaacaggttctgggcttcagtggagccctactgtgctgacatcaccagcgaggaggtccgcacacttgaggagttactgaagcccccagaagatgaggctgagcattacaagatcccacccctggggaagcactactcccagcgctgggcccaggaggacctgctggaggagcagaaggatggggcccgggcagcggctgtggctgacaagaagaaaggcctcatggggccactgaccgaactggacactaaagatgtggatgccctgctgaagaagtctgaggcccagcatgaacagccggaagatggatgcccctttggtgccctgacgcagcgcctcctgcaggccctggtggaggaaaatattatttcccctatggaggattctcctattcctgacatgtctgggaaagaatcaggggctgacggggcaagcacctcccctcgcaatcagaacaagcccttcagtgtgccgcatactaagtccctggagagccgcatcaaggaggagctaattgcccagggccttttggagtctgaggaccgccccgcagaggactccgaggatgaggtccttgctgagcttcgcaaacggcaggctgagctgaaggcacttagtgcccacaaccgcaccaagaagcacgacctgctgaggctggcaaaggaggaggtgagccggcaggagctgaggcagcgggtgcgcatggctgacaacgaggtcatggacgcctttcgcaagatcatggctgcccggcagaagaagcggactcccaccaagaaagaaaaggaccaggcctggaagactctgaaggagcgtgagagcatcctgaagctgctggatgggtagccctcacccctgcctcaggctgattatctggcctaggggaggggaagggaggcccacttccttctttgggcacaggaaacattggcctgtggctgtccctcaaatggcggcagtctctagagggccgtggcccttcccctgaggtcttttggcctagctctgtacaaccaggacacaggaagccctgctgggctagcctgaggcctagtctctgcttggtccccgagatggggttggaggggacttcgtttctgggtcttcctcttcccctctttaccatcccccactccctaatcccctacccctgtctccccttcaaggacttctcccttgtggttttgtaaagtgcaaacttaagaataaagtgactgctgtggtttttcaaaaaaaaaaaaaaa

SEQ ID NO: 409 - DNA, 484 bp, Homo sapiens
  ref <308>: DATABASE ACCESSION NUMBER: NCBI / NM_014302
  ref <309>: DATABASE ENTRY DATE: 2011-11-20
  ref <313>: RELEVANT RESIDUES IN SEQ ID NO: (1)..(484)
ggcagaaacccggattccggttccggtgggcctccatcagcaagctccagtgctacgtgtccctggcattttaggtgtcggttgggtaggcagtcatggatcaggtaatgcagtttgttgagccaagtcggcagtttgtaaaggactccattcggctggttaaaagatgcactaaacctgatagaaaagaattccagaagattgccatggcaacagcaataggatttgctataatgggattcattggcttctttgtgaaattgatccatattcctattaataacatcattgttggtggctgaatacattttggaagagagtttttcatcttagagattggtgaacaagtgtgagggtgtgagaaactcacagaatacaaatttgcctgtatgttttgtgggtttttttttttcctttcaagatgttttctatttctaaattaaagtaatttcaaagtaaatgaataaaaaaaaaaaaaaaaaaa

SEQ ID NO: 410 - DNA, 1196 bp, Homo sapiens
  ref <308>: DATABASE ACCESSION NUMBER: NCBI / NM_006118
  ref <309>: DATABASE ENTRY DATE: 2011-11-19
  ref <313>: RELEVANT RESIDUES IN SEQ ID NO: (1)..(1196)
acgtccggcttaccgtcgtttacgacagtgtcaggatcgcgggcttgctttccggtagcgtgggctgacgcctcgctcaatttctcacagggctgcgcaggtttcccccgtctgcgaatggaccactggaggggttcaaaggttcgcgtcccagtacgggaatgagcctctttgatctcttccggggctttttcggctttcctggacctcggagccacagagatcccttttttggagggatgactcgagatgaagatgatgatgaggaagaagaagaagaagggggctcatggggccgtgggaacccaaggttccatagtcctcagcacccccctgaggaatttggcttcggcttcagcttcagcccaggaggagggatacgtttccacgataacttcggctttgatgacctagtacgagatttcaatagcatcttcagcgatatgggggcctggaccttgccttcccatcctcctgaacttccaggtcctgagtcagagacacctggtgagagactacgggagggacagacacttcgggactcaatgcttaagtatccagatagtcaccagcccaggatctttgggggggtcttggagagtgatgcaagaagtgaatccccccaaccagcaccagactggggctcccagaggccatttcataggtttgatgatgtatggcctatggacccccatcctagaaccagagaggacaatgatcttgattcccaggtttcccaggagggtcttggcccggttctacagccccagcccaaatcctatttcaagagcatctctgtgaccaagatcactaaaccagatgggatagtggaggagcgccggactgtggtggacagtgagggccggacagagactacagtaacccgacacgaagcagatagcagtcctaggggtgatccagaatcaccaagacctccagccctggatgatgccttttccatcctggacttattcctgggacgttggttccggtcccggtagccttgttaaccctcagaggccttcaagtcctttccacctctcacccattgcccaccattaataagcttagcttctcttgccacctcaggggcttggatatgtggaatagtgaactggggccatgtcagtttgtcactcacccaaactgaccaataaaacctttatttatgctaaaaaaaaaaaaaaaaaaaaaaa

SEQ ID NO: 411 - DNA, 2438 bp, Homo sapiens
  ref <308>: DATABASE ACCESSION NUMBER: NCBI / NM_012100
  ref <309>: DATABASE ENTRY DATE: 2011-11-26
  ref <313>: RELEVANT RESIDUES IN SEQ ID NO: (1)..(2438)
aaacatggggcggggcggcgcggccggggaagcgtgatgaaggcctacgagtgcggcgcggcctgaaggggcacgcgggggacctgcaaagctagtgaggggcggggcaggcggcgcggtgggggcgggccgagcccggaggccagatgagcggacacagccccacgcgcggggccatgcaggtggccatgaacggtaaggcccgcaaagaggcggtgcagactgcggctaaggaactcctcaagttcgtgaaccggagtccctctcctttccatgctgtggctgaatgccgcaaccgccttctccaggctggcttcagtgaactcaaggagactgagaaatggaatattaagcccgagagcaagtacttcatgaccaggaactcctccaccatcatagcttttgctgtagggggccagtacgttcctggcaatggcttcagcctcatcggggcccacacggacagcccctgcctccgggtgaaacgtcggtctcgccgcagccaggtgggcttccagcaagtcggtgtggagacctatggtggtgggatctggagcacctggtttgaccgtgacctgactctggctggacgcgtcattgtcaagtgccctacctcaggtcggctggagcagcagctggtgcacgtggagcggcccattcttcgcatcccacacctggccatccatctgcagcgaaatatcaacgagaactttgggcccaacacagagatgcatctagtccccattcttgccacagccatccaggaggagctggagaaggggactcctgagccagggcctctcaatgctgtggatgagcggcaccattcggtcctcatgtccctgctctgtgcccatctggggctgagccccaaggacatagtggagatggagctctgccttgcagacacccagcctgcggtcttgggtggtgcctatgatgagttcatctttgctcctcggctggacaatctgcacagctgcttctgtgccctgcaggccttgatagattcctgtgcaggccctggctccctggccacagagcctcacgtgcgcatggtcacactctatgacaacgaagaggtggggtctgagagtgcacagggagcacagtcactgctgacagagctggtgctgcggcggatctcagcctcgtgccagcacccgacagccttcgaggaagccatacccaagtccttcatgatcagcgcagacatggcccatgctgtgcatcccaactacctggacaagcatgaggagaaccaccggcctttattccacaagggccccgtgatcaaggtgaacagcaagcaacgctatgcttcaaacgcggtgtcagaggccctgatccgagaggtggccaacaaagtcaaggtccccctgcaggatctcatggtccggaatgacaccccctgtggaaccaccattggacctatcttggcttctcggctggggctgcgggtgctggatttaggcagcccccaactggccatgcactctatccgggagatggcctgcaccacaggagtcctccagaccctcaccctcttcaagggcttctttgagctgttcccttctctaagccataatctcttagtggattgagccctcttggaaagacttctctgccatccctttgcacctgagaggggaagttctcagctgagctgaagctggattattaaagtggattgtcactcagactctccgtgctacgcttatttggagactagaggagtgggagttgagcctggcttgaacctttggaaccagaaaagttggggagcaggtggaggaggccacactcctgggagctgatggttttaaatctggttttaaatctcttctctgtctcaagtccatgtctgaagtgggtgaagggtggactggatcctcaagcagaaggtcacttctcccacccctagtcctccacctgggaaatggcctcaacggtcttccctctttccatccccagaatgggtgtcccgctctgccttcagagatcctgttctgcactgggccaccttcagagctgctctgggcagacaaagctgtttctcaccctcccaaaatcccttcccatcccctctcaggagctgcaaagagaagggcacagtctataccttatcacccttcatcatccacttctcagcagtccctggtattacttgattgtgaacatattatcaggaaaaaagattatcattgaaaaaattggaaaagtcaaagtctggccgggtgcagcggctcacatctgtattcccagcattttgggaggccaaggcaggtggatcacttgaggtcagagttcaagaccagccttgccaacatggtgaaacccatctctacttaaaaaaaaatacaaaaaaattagccaggcatggtggcacacacctgtaatctcagctattcaggagactgaggcaggagaatagcttg

SEQ ID NO: 412 - DNA, 2100 bp, Homo sapiens
  ref <308>: DATABASE ACCESSION NUMBER: NCBI / NM_015680
  ref <309>: DATABASE ENTRY DATE: 2011-05-15
  ref <313>: RELEVANT RESIDUES IN SEQ ID NO: (1)..(2100)
ggggggagggagctgcgagggcgagggcgaggacggcggcccgccccggggaggcaggctggcaggtggacaggcgggcaaggacagctccgcgagccccctacaactcgtttccttccgttcaccttcgcagggcggcgactggcggcgcgatggacctgaccgggctcctgctggacgaagaaggcaccttctccctcgccggcttccaggacttcacgttcctcccaggacaccagaagctgagtgcccggatccgaaggaggctctactatggctgggactgggaagccgactgtagcctggaggagctctccagcccggtggcagacattgctgtcgaactgctccagaaggcagcccccagccctattcgccgactccagaagaaatatgtagctcatgtgtcccgggaggcatgcatctccccatgtgctatgatgctggctctggtgtacattgaacggctccggcaccgaaacccagactacttgcagcatgtgtcatcctctgacttgttcctgatctccatgatggtggccagtaagtacctctatgatgaaggggaggaggaggaggtcttcaacgacgaatggggagctgctgggggtgtggccgtgcccactctcaatgccttggagaggggcttcctgagtgccatggattggcatctctacactgaccctcgggagatctttgaggtgctgagctggttggagagctgtgtggctgagcagcagggacggtggcgaggctggtacacctacacagacctgtgtgtgctgctggagcagccgacctggcagttggccctgggctccctctgccagcggctggtaaagctgtcttgcctgttagctgtggcatatgtgagcagtgtggccctggctgtggcatcggtggccgtaatacatcagtctttggggctgtcctgcatccctacacctgggccgcctgaccttggactgacctcccgttgcctcctggagccctgcataccttctgtgccacaatgcctgccgtctctcgctaatgtctccagctgcctggaaggcagcatggggctgcggtcactctggggcagtcttctggcctcactgactcctccaccattgcctcccccagacccccctgcccctcccactcttcttcataactgccacctttgccagaagctccagagagactccccaacctgccatgcctgcctccaccccaaccgtacagtccccactgcgctgtccagcccctggtaccatacctatggcctggctcccccctggccttggagcccggtgcccctttcacttcctcagcctcagcaatgttcccttttcagtgtcatggagctggctcgcctcaagtctttcgttttcccaggctaggtagggctgtgaggaatgcattaagagggtttgggagtttctgagaacctggaggagcaaagcttgattcagatcctgtctgcctcgctgggtccttggcaggtcccctgtcctcctgggtgggagcttatggggtggtggggcagaaggactgaaggtaattcactcctagatcgcagtggctggctgcttggccaggacagtgatgccgccagggagagcttccgcttggtgaccagggacatgtcccagatggacatagaagcccctctctgcctccctgggattttttagacttttacttttgatttccctaggatggaagagtataggtgggagataagggaagtggggtgagaggagaaaggaaatgttggcatgggcctgtgtgatgtccctgaggcagaagagccggggactgatgggttcaggtgggagctgctgggtgaggcagggaacccttttcactcccattccttagctttagtctaatggagccaaggactgctgggaccttcaaccctgatcttttgtcttccagtcttctcttagtgtcctgctcctaggtttccctctcttctggttcttctcccaggtattctcttcccaggcctctctggccactgctttgtatcagggtttttcacgcttttgtagaactgaggtttcaataaacagtttcagttgcaaaaaaaaaaaaaaaaaaaaaaaaaaa

SEQ ID NO: 413 - DNA, 2962 bp, Homo sapiens
  ref <308>: DATABASE ACCESSION NUMBER: NCBI / NM_030796
  ref <309>: DATABASE ENTRY DATE: 2011-11-09
  ref <313>: RELEVANT RESIDUES IN SEQ ID NO: (1)..(2962)
ggggcggagcgcagccagggctgcgcggcgcgccccggctcccgcccgctcccagccgggccccccagcggtcggcgggacggctcccggctgcagtctgcccgcccgccccgcgcgggggccgagtcgcgaagcgcgcctgcgacccggcgtccgggcgcgctggagaggacgcgaggagccatgaggcgccagcctgcgaaggtggcggcgctgctgctcgggctgctcttggagtgcacagaagccaaaaagcattgctggtatttcgaaggactctatccaacctattatatatgccgctcctacgaggactgctgtggctccaggtgctgtgtgcgggccctctccatacagaggctgtggtacttctggttccttctgatgatgggcgtgcttttctgctgcggagccggcttcttcatccggaggcgcatgtaccccccgccgctgatcgaggagccagccttcaatgtgtcctacaccaggcagcccccaaatcccggcccaggagcccagcagccggggccgccctattacaccgacccaggaggaccggggatgaaccctgtcgggaattccatggcaatggctttccaggtcccacccaactcaccccaggggagtgtggcctgcccgccccctccagcctactgcaacacgcctccgcccccgtacgaacaggtagtgaaggccaagtagtggggtgcccacgtgcaagaggagagacaggagagggcctttccctggcctttctgtcttcgttgatgttcacttccaggaacggtctcgtgggctgctaagggcagttcctctgatatcctcacagcaagcacagctctctttcaggctttccatggagtacaatatatgaactcacactttgtctcctctgttgcttctgtttctgacgcagtctgtgctctcacatggtagtgtggtgacagtccccgagggctgacgtccttacggtggcgtgaccagatctacaggagagagactgagaggaagaaggcagtgctggaggtgcaggtggcatgtagaggggccaggccgagcatcccaggcaagcatccttctgcccgggtattaataggaagccccatgccgggcggctcagccgatgaagcagcagccgactgagctgagcccagcaggtcatctgctccagcctgtcctctcgtcagccttcctcttccagaagctgttggagagacattcaggagagagcaagccccttgtcatgtttctgtctctgttcatatcctaaagatagacttctcctgcaccgccagggaagggtagcacgtgcagctctcaccgcaggatggggcctagaatcaggcttgccttggaggcctgacagtgatctgacatccactaagcaaatttatttaaattcatgggaaatcacttcctgccccaaactgagacattgcattttgtgagctcttggtctgatttggagaaaggactgttacccatttttttggtgtgtttatggaagtgcatgtagagcgtcctgccctttgaaatcagactgggtgtgtgtcttccctggacatcactgcctctccagggcattctcaggcccgggggtctccttccctcaggcagctccagtggtgggttctgaagggtgctttcaaaacggggcacatctggctgggaagtcacatggactcttccagggagagagaccagctgaggcgtctctctctgaggttgtgttgggtctaagcgggtgtgtgctgggctccaaggaggaggagcttgctgggaaaagacaggagaagtactgactcaactgcactgaccatgttgtcataattagaataaagaagaagtggtcggaaatgcacattcctggataggaatcacagctcaccccaggatctcacaggtagtctcctgagtagttgacggctagcggggagctagttccgccgcatagttatagtgttgatgtgtgaacgctgacctgtcctgtgtgctaagagctatgcagcttagctgaggcgcctagattactagatgtgctgtatcacggggaatgaggtgggggtgcttattttttaatgaactaatcagagcctcttgagaaattgttactcattgaactggagcatcaagacatctcatggaagtggatacggagtgatttggtgtccatgcttttcactctgaggacatttaatcggagaacctcctggggaattttgtgggagacacttgggaacaaaacagacaccctgggaatgcagttgcaagcacagatgctgccaccagtgtctctgaccaccctggtgtgactgctgactgccagcgtggtacctcccatgctgcaggcctccatctaaatgagacaacaaagcacaatgttcactgtttacaaccaagacaactgcgtgggtccaaacactcctcttcctccaggtcatttgttttgcatttttaatgtctttattttttgtaatgaaaaagcacactaagctgcccctggaatcgggtgcagctgaataggcacccaaaagtccgtgactaaatttcgtttgtctttttgatagcaaattatgttaagagacagtgatggctagggctcaacaattttgtattcccatgtttgtgtgagacagagtttgttttcccttgaacttggttagaattgtgctactgtgaacgctgatcctgcatatggaagtcccacttcggtgacatttcctggccattcttgtttccattgtgtggatggtgggttgtgcccacttcctggagtgagacagctcctggtgtgtagaattcccggagcgtccgtggttcagagtaaacttgaagcagatctgtgcatgcttttcctctgcaacaattggctcgtttctcttttttgttctcttttgataggatcctgtttcctatgtgtgcaaaataaaaataaatttgggcaaaaaaaaaaaaaaaaaaa

SEQ ID NO: 414 - DNA, 1461 bp, Homo sapiens
  ref <308>: DATABASE ACCESSION NUMBER: NCBI / NM_024069
  ref <309>: DATABASE ENTRY DATE: 2011-11-26
  ref <313>: RELEVANT RESIDUES IN SEQ ID NO: (1)..(1461)
gtctaagccccgccctttcctgtcgtgacttaacgcacgcaagcggctccagggtacgtccccgccacgcgcgctcgcaggatcggtgcgtggtgacgtttcgccggcgcgggcgccatcccggaagcgcgagcaaggccgccagatgtgcaggcagcggaggaggagaaagagatggacctcccggactcggcctcgagggtcttctgcggccgcatcctgagcatggtgaacacagatgatgtcaacgccatcatcctggcccagaagaacatgctggaccgctttgagaagaccaatgagatgctgctcaacttcaacaacctgtccagtgcccgcctgcagcagatgagcgaacgcttcctgcaccacacgaggaccctagtagagatgaaacgggacctggacagcatcttccgccgtatcaggacgctgaaagggaaactggccaggcagcacccagaggccttcagccatatcccagaggcatccttcctggaggaagaggatgaagaccccatcccacccagcaccacgaccaccattgccacctcagaacagagcacgggctcatgtgacaccagccccgacaccgtctcgccctccctgagccccggcttcgaggacctgtcccatgtccagcctggctccccagccatcaacggccgcagccagacagatgacgaggagatgacgggcgaatagccctgctgcccggtgccttgagggggtctcagggcagcagcatacaaggtggcagcgggtaaccctgccttgttctgtcatccagggctcctttgctgccccgttctgtcacccagggctcctagggggacaaggctctctcccgaggggtgtggaattcctgggggggtctttaattctggctccttccttcctcagaacatctctattctgcaagacccctctgccatgccagggcacgcccattccagctggagtcgtggggctgggcacaggggaatttttccagagctgagcctgacgtctgctctgaagaatgcttagaaggttcccagacaccagagccagatgtcccccaccaccggtcaggacctccttgaggtgcacaagcacggtctcctctgagttcaccccagcccacccccgcacccactaattctgcttttcctgccccttgctccgtaaaagtatcaaatactttctccttggtatctcaaggaggtttctgagataggtagaagtcttgagacggaggctggccatccattcagccctgagcgtgctgagttctgtgtttctctgaatagaggtgtggaacctgaggggccagcaggcctctctgaaggcctccatggagcaaacggagccacctcgggaaagagtttaatggaatatttttgtacccgatgtttacagatgctgttgggaagttatcaataaaaagacaccattactaaaaagggaaaagtacaccta

SEQ ID NO: 415 - DNA, 910 bp, Homo sapiens
  ref <308>: DATABASE ACCESSION NUMBER: NCBI / NM_013234
  ref <309>: DATABASE ENTRY DATE: 2011-11-21
  ref <313>: RELEVANT RESIDUES IN SEQ ID NO: (1)..(910)
agtcacgtggcagccggaaagcgtggcggctgctgctagagcctttccctttaccgcacccaaggagctggagcgacaacaacgacgtcgtttccgtttccaccacctcttcctgttcccgtccttgaggacgccgtgccgggtcagtgttagcctccagccctggttgtggaaggcgacagaagtcatggcgatgtttgagcagatgagagccaacgtgggcaagttgctcaagggtatcgacaggtacaatcctgagaacctggccaccctggagcgctatgtagagacgcaggccaaggaaaatgcctatgatctggaagccaacctggctgtcctgaagctgtaccagttcaacccagccttctttcagaccacggtcaccgcccagatcctgctgaaggccctcaccaacttgccgcacacagacttcaccctgtgcaagtgcatgatcgaccaggcacatcaagaagaacggccaatccgacagattttgtacctcggggacctgctggagacctgccatttccaggccttctggcaagccctggatgaaaacatggacctcttggaaggtataactggctttgaagactctgtccgaaagtttatctgccatgttgtgggtatcacttaccagcacattgaccgctggctgctggccgagatgctcggggatctgtcggacagccagctaaaggtgtggatgagcaaatacggctggagtgccgacgagtcggggcagatcttcatctgtagccaagaagagagcattaaacccaagaacattgtggagaagattgactttgacagtgtgtccagcatcatggcctcctcccagtaacttcaggtgtttaataaagatgtgttgactcagccaaaaaaaaaaaaaaaaaaaaaaaaaaaaaaa

SEQ ID NO: 416 - DNA, 1222 bp, Homo sapiens
  ref <308>: DATABASE ACCESSION NUMBER: NCBI / NM_013310
  ref <309>: DATABASE ENTRY DATE: 2011-11-09
  ref <313>: RELEVANT RESIDUES IN SEQ ID NO: (1)..(1222)
gcttttagagcactgtgatgtaacatgtcaagcagaaatagggagcatgtttacagccattctatgaaaaagtgttcggaatgtacagactagcacagaagctggactaattgaacaagtattgctgaaaatgagtgctgtagatgacatgatagcagagtaccttcaagtttaaatctgagagtgatattcatttggcagaacatcataaacaggttttgtatgatgggaaacttgcaagtagcattacctttacatatactgctaaggccactgatgctcaactctgcctggaatcatcaccaaaagagaatgcatcaatttttgtgcattcccaacatgctctaatgcttcagattcaagtgctttttccactgtttccccaattggataatcggcagctcaatgacagtcaagtggaaacaactgtctgctcctgcttcaggtgcagaaatacagcgatttccagtgccagctgttgagccagtgccagcaccaggggcagattcccctccagggacagcgctggagctagaggaagctccagagccctcctgccgctgccctgggactgcccaggaccagcccagtgaggagctgcctgacttcatggcacctcctgtagagccaccggcctcagccctggagctgaaagtgtggctggagctagaggtggcagagaggggtggccagcacagctccagccagcagctcccacactgctcccagtcctgggcacagtggaagctatggaggcagagaccagggtttgcaatctgggctcctctgcctcactggagagggacttctctcattcagcagagcagcagccctgctgctgaagggcctgctgctactgctgctggggctgtttgcctgcctgcaggaggtgctggagagcaagaaaaggagcctgtgagcaggggttccagcaggtcctcctgctcccagaggcgacctcctcctccaggcatggaggtttgccctcagctgggcatctgggccatttgcccctaacgtgctgcccaggatggcctcctcttgacaggcggacagggggtgagggggccagggggcatctccaaaggaagcttttaaactcagcagctgcaccccagaatctgtatgcctgcacctgcccaaggatttattcatagcttacctaagaatttcaaatttctaccataacactgaataaagtttgactttttgaaacttcaaa

SEQ ID NO: 417 - DNA, 1268 bp, Homo sapiens
  ref <308>: DATABASE ACCESSION NUMBER: NCBI / NM_018507
  ref <309>: DATABASE ENTRY DATE: 2004-01-23
  ref <313>: RELEVANT RESIDUES IN SEQ ID NO: (1)..(1268)
ggcattaatcaatccctgtttctattttaataggggggacaaggtaggggagagggaaaaacagttttggatataactatttggaaggagagtagacatgaagagggcaaaccctagcttttcattatctacaatcaatagtttgtttttcttttttaaaaaagaaagaaaaaccctttcaatcttcaatactctttaaaagcccacttcttagctactggccaatccacaccaattatttaaattcacttggtacacacctttgtccactgggtaaattatattcattatgcccactgctgcagcacgcataaaccaacacccctgcatggctgaacagggcctaatctaggactgatgggagaagggcttgcaaaccaagatcaaggtgtttctccgctaatactgtctaccaagctgatccctacaaaaatgcatataaaagcaggcaagtttagctactgtgttgcaagagaaaccaggaccttgttaaatagttctctccattaccatttattctctcaagggaagcttaaaaaaacaacaacaacaaaacaacacattggtctggccacctcatgaatccaacaagcattagtgtggcatttcagtggagaaggaaacttggggggaaaaatcccatcaaggttgtaagaaaggctcccaatttaactgtccctgtccctatttatccatcatccaagaccatccattattctagagcactctgatcaataaaaggggtccaagcatcaggagcaggcaaggagaaccaaaagacatcaagaaaccgatttgcttgagaaaagcagcgattcttcctttcagagttctccatggctgagaaaatgcccaagacatcatgtatgtgacttagatactgctttttgggaggttaagagtagcatgaagaacttaagatgatgataagagtctaaatttttagtttcaaggtttcaatagaatgtggatatattcaaaactttcaaaaaggacagtgtttagaaagggtaaaactaggacacagaaaacactgggaattaccacgacccccaagtgcttccggctccaggaaataaccattcatgtgtttgctggaggtcacacaattttcccctattacctggtgcaaaatgactcatcacttcccaaaagcttcttttcaaaccacgattttcccatttattttggtccaatgcagtcccattctttatggcctatagtctcactcccaactacccccctggggggttaaaaaaaaaaaaaaa

SEQ ID NO: 418 - DNA, 2310 bp, Homo sapiens
  ref <308>: DATABASE ACCESSION NUMBER: NCBI / NM_017670
  ref <309>: DATABASE ENTRY DATE: 2011-11-19
  ref <313>: RELEVANT RESIDUES IN SEQ ID NO: (1)..(2310)
agttaggtcatgaggctttggccttgacaccaagggatgctgtctccttgccggaagcagctcaccaaagccggcagagaacccaggttccgtggggccacgatgtggggctccgcgggcgccccggcgctggccgacttcctgtctcctgggtcagatgctgctccgcactgcagctatggtcgcatgcagtgcctgccgaagcccgcagcaggaatgctgccttcggtgattttaatttcacttttctacttctctcaataacaaaatccgcgtttcaaactccagggaaaagaaaacggaattggctccaggaggatctgcaatcaccaccgggaactttgggaggctgggaagatggagccaaaccaatgtgtggggtggaggtgcggatctggggcggccggcctctcctacaggtctcaggtccgcaggcctggcgtgccagcacctgccacgggactggaagcccattccttgacaacgcctaaggggatcccgttgctagggctgttgccaaggcggggcaacgaggaggggctcgcttccgggaggacggcaattggcaacccggaagcggtcggtagtgcggcgctgtttaaagatggcggcggaggaacctcagcagcagaagcaggagccgctgggcagcgactccgaaggtgttaactgtctggcctatgatgaagccatcatggctcagcaggaccgaattcagcaagagattgctgtgcagaaccctctggtgtcagagcggctggagctctcggtcctatacaaggagtatgctgaagatgacaacatctatcaacagaagatcaaggacctccacaaaaagtactcgtacatccgcaagaccaggcctgacggcaactgtttctatcgggctttcggattctcccacttggaggcactgctggatgacagcaaggagttgcagcggttcaaggctgtgtctgccaagagcaaggaagacctggtgtcccagggcttcactgaattcacaattgaggatttccacaacacgttcatggacctgattgagcaggtggagaagcagacctctgtcgccgacctgctggcctccttcaatgaccagagcacctccgactaccttgtggtctacctgcggctgctcacctcgggctacctgcagcgcgagagcaagttcttcgagcacttcatcgagggtggacggactgtcaaggagttctgccagcaggaggtggagcccatgtgcaaggagagcgaccacatccacatcattgcgctggcccaggccctcagcgtgtccatccaggtggagtacatggaccgcggcgagggcggcaccaccaatccgcacatcttccctgagggctccgagcccaaggtctaccttctctaccggcctggacactacgatatcctctacaaatagggctggctccagcccgctgctgccctgctgcccccctctgccaggcgctagacatgtacagaggtttttctgtggttgtaaatggtcctatttcacccccttcttcctgtcacatgacccccccccatgttttattaaagggggtgctggtggtgagccgtgtgtgcgtgtccctgctctgctgcccgcctggctgctctgtctgctgccccctccccccaggtgggtccccctgcttttcacctatctactcctgagcttccccaacaggagcaggtttgaggggccaggcctcttggaggcccctcctgcttcgttgggttctgcttccttcccttcttagctggctcaggggcttctatgggatcctggaagttccttagggacttgcccagggtcccagggccacccacacttcatctgctccctcataggccccacctccacgtcccggctgggccccagaccccagcttcctgccctccaccgggagtctgcatggttgggagtcctgggtggaggggcctttgtgaggctggacccggctcagggcaggtggaggagctgggcctcccacagggtgcccgggcagtgccatcctggtgggggagggcagccttcaaacgtgtggggtctacagtcctcaggtctaggcagggctgccggttctccacctccccatccgccccaggccccctgcctgtgcctgccttgcaccccctctgcttgggccacggtgtctctgcattgcctgcctttttgccttcacctcttttcttccccgccccctgcacattcggggtctcagcccccaggctgtgagctccttgggggcaggccctcaataaatgtgaactgctgctgccgcctctgcaaaaaaaaaaaaaaaa

SEQ ID NO: 419 - DNA, 2310 bp, Homo sapiens
  ref <308>: DATABASE ACCESSION NUMBER: NCBI / NM_016292
  ref <309>: DATABASE ENTRY DATE: 2011-11-26
  ref <313>: RELEVANT RESIDUES IN SEQ ID NO: (1)..(2310)
gaggaagccccgccccgcgcagccccgtcccgccccttcccatcgtgtacggtcccgcgtggctgcgcgcggcgctctgggagtacgacatggcgcgcgagctgcgggcgctgctgctgtggggccgccgcctgcggcctttgctgcgggcgccggcgctggcggccgtgccgggaggaaaaccaattctgtgtcctcggaggaccacagcccagttgggccccaggcgaaacccagcctggagcttgcaggcaggacgactgttcagcacgcagaccgccgaggacaaggaggaacccctgcactcgattatcagcagcacagagagcgtgcagggttccacttccaaacatgagttccaggccgagacaaagaagcttttggacattgttgcccggtccctgtactcagaaaaagaggtgtttatacgggagctgatctccaatgccagcgatgccttggaaaaactgcgtcacaaactggtgtctgacggccaagcactgccagaaatggagattcacttgcagaccaatgccgagaaaggcaccatcaccatccaggatactggtatcgggatgacacaggaagagctggtgtccaacctggggacgattgccagatcggggtcaaaggccttcctggatgctctgcagaaccaggctgaggccagcagcaagatcatcggccagtttggagtgggtttctactcagctttcatggtggctgacagagtggaggtctattcccgctcggcagccccggggagcctgggttaccagtggctttcagatggttctggagtgtttgaaatcgccgaagcttcgggagttagaaccgggacaaaaatcatcatccacctgaaatccgactgcaaggagttttccagcgaggcccgggtgcgagatgtggtaacgaagtacagcaacttcgtcagcttccccttgtacttgaatggaaggcggatgaacaccttgcaggccatctggatgatggaccccaaggatgtccgtgagtggcaacatgaggagttctaccgctacgtcgcgcaggctcacgacaagccccgctacaccctgcactataagacggacgcaccgctcaacatccgcagcatcttctacgtgcccgacatgaaaccgtccatgtttgatgtgagccgggagctgggctccagcgttgcactgtacagccgcaaagtcctcatccagaccaaggccacggacatcctgcccaagtggctgcgcttcatccgaggtgtggtggacagtgaggacattcccctgaacctcagccgggagctgctgcaggagagcgcactcatcaggaaactccgggacgttttacagcagaggctgatcaaattcttcattgaccagagtaaaaaagatgctgagaagtatgcaaagttttttgaagattacggcctgttcatgcgggagggcattgtgaccgccaccgagcaggaggtcaaggaggacatagcaaagctgctgcgctacgagtcctcggcgctgccctccgggcagctaaccagcctctcagaatacgccagccgcatgcgggccggcacccgcaacatctactacctgtgcgcccccaaccgtcacctggcagagcactcaccctactatgaggccatgaagaagaaagacacagaggttctcttctgctttgagcagtttgatgagctcaccctgctgcaccttcgtgagtttgacaagaagaagctgatctctgtggagacggacatagtcgtggatcactacaaggaggagaagtttgaggacaggtccccagccgccgagtgcctatcagagaaggagacggaggagctcatggcctggatgagaaatgtgctggggtcgcgtgtcaccaacgtgaaggtgaccctccgactggacacccaccctgccatggtcaccgtgctggagatgggggctgcccgccacttcctgcgcatgcagcagctggccaagacccaggaggagcgcgcacagctcctgcagcccacgctggagatcaaccccaggcacgcgctcatcaagaagctgaatcagctgcgcgcaagcgagcctggcctggctcagctgctggtggatcagatatacgagaacgccatgattgctgctggacttgttgacgaccctagggccatggtgggccgcttgaatgagctgcttgtcaaggccctggagcgacactgacagccagggggccagaaggactgacaccacagatgacagccccacctccttgagctttatttacctaaatttaaaggtatttcttaacccgaaaaaaaaaaaaaaa

SEQ ID NO: 420 - DNA, 8961 bp, Homo sapiens
  ref <308>: DATABASE ACCESSION NUMBER: NCBI / NM_014916
  ref <309>: DATABASE ENTRY DATE: 2011-11-27
  ref <313>: RELEVANT RESIDUES IN SEQ ID NO: (1)..(8961)
gcggcgggagcgcggcttcccaggcccgccgctccgcagggctgctggcgttgctgctgttgagaggcggcggcggcggcgcaggcgggcgggaaggatggtgtttctgcgactggagcggcaggtgcggaccgggagccggaccgaggtttggcagaagcaacgtgtgctcgggagcaaccggcgcgggtgccactgaggcagcggagggaggcaggatcgactgacgggcgaacggacggacggacggaaggcgactcgagggccggccccggagccgcgccgtgggcgagatgccggggccgccggcgttgcggcggaggctgctgctgctgctgctggtcctcctgatcgccggcagtgctggggccgcgccacttccgcaaacaggtgcaggggaggcgccacctgctgcagaagtttcctcatcttttgtgatcctgtgtgtgtgcagtttaataatattaatagtgttaattgcaaactgtgtatcctgctgtaaggacccagaaatagactttaaggaatttgaagataattttgatgatgagatagatttcacaccaccagcagaagacactccctctgttcagtccccagcagaggtcttcacactttcagtaccaaatatttcactcccagctccctcgcaattccagccttctgtagagggattgaagtctcaagttgcccgccacagtctaaactacatacaggaaattggaaatggctggtttggaaaggttctcttgggagagatttacacgggcactagcgtagcaagagtcatcgtgaaggagttaaaagcaagtgccaacccaaaggaacaagatacttttttgaaaaatggagaaccttactacattcttcagcatccaaatattcttcagtgtgttggacagtgcgtagaagcgattccctacctcctggtgtttgagttctgtgacttgggtgacctgaaggcgtatctgcgcagcgagcaggagcacatgcggggggactcacagaccatgctgctgcagaggatggcgtgcgaggtcgccgcggggctggccgccatgcacaagctgcacttcctgcacagtgatttagccctgcggaattgttttctcacctccgacttaaatgtgaaagtgggagattacggaataggattcagcaggtacaaggaggattatattgaaacagatgataaaaaagttttccctctgcgatggactgctccagaattagtaaccagctttcaagacagactgctaactgcagatcagactaagtatagtaatatctggtctctgggtgtgacactttgggagctttttgacaatgccgcacagccgtattcaaacctttccaacttagatgtcctcaaccaagtcattagagagagagacacaaaactcccgaagccccagctggagcagccctactctgatagatggtatgaagtcttacagttctgttggctgtcaccagaaaagagacccgcggctgaagatgtgcacaggctgctgacttacctgcggctgcagagccagcgggactcagaggtcgactttgaacagcagtggaacgctctgaagccgaacacaaacagcagagactcctccaacaatgctgcattcccaattctcgaccactttgccagggaccggctgggtcgtgaaatggaggaagtcctcaccgtgaccgaaaccagccagggcctgagcttcgagtatgtctgggaggccgctaagcacgaccactttgacgagcgcagccggggccacctggacgaaggcttgtcctacacgagcatcttctatccggttgaagtttttgagagttcgctttcagatcctgggcccggaaagcaagatgacagcggccaggatgtccccctgagggtccctggagtggttcctgtttttgatgcccacaacctttctgttggaagcgactattatatccagttagaagaaaaaagtggtagtaacttggagcttgattacccaccagcgctgctcacaaccgacatggataatccagaaaggactggccctgaactgtcccagctcacggcgctcaggagcgttgaacttgaggagtccagtacagatgaggacttcttccaaagcagtacagaccccaaagactctagcttaccaggggacttacacgtgaccagtggccccgagagccctttcaacaatatatttaatgatgtggacaaatcggaagatttgcccagtcaccaaaaaatattcgacttaatggaattaaacggagttcaagccgactttaaacctgccactttaagttccagtttggataaccccaaagagtcagtcataacaggccactttgagaaagaaaagccccgtaagatttttgacagtgagcctctctgcctatcagataatcttatgcaccaagataattttgatccattgaatgttcaagaattgtcagaaaactttttatttcttcaagagaaaaacttactaaaaggctcattgtccagcaaagaacacataaatgatcttcagacagaacttaagaatgctggttttactgaagctatgttagaaacgtcatgtagaaactctttagatactgagcttcagtttgctgaaaataagccaggcttgtctttgttgcaggaaaacgtaagcacaaagggtgacgatacagatgtcatgctcacaggtgacactttgagcacctcattgcagtcttccccggaagtgcaggtacctcctacctccttcgaaacagaagaaacgccccgtcgggtacccccagactcactcccaacacagggagaaacccagcccacgtgtttagatgttattgtcccggaggactgtctccaccaggacatcagtccagacgctgtgactgtcccggttgaaattctctcaactgatgccagaacccacagcctggataacaggtcccaggactctcctggcgagagtgaggagaccctgcgactcaccgaaagtgactctgttcttgctgatgacatccttgccagcagggtgagtgtagggagtagtctcccggaactgggacaggaattgcacaataaaccattttcggaagaccatcacagtcatcgccggctagagaaaaacttagaggctgtggagactttaaatcagctcaattctaaagacgcagcaaaagaagcaggcttggtgtctgccctctcctcggactcaaccagtcaggacagcctcctggaggacagcttgtcagcacccttcccagcctctgagccgtccctggaaaccccggactctctggagtcagtggatgtccacgaagcgctactggactctttaggatctcacactccccagaaactagtgccccccgataagccggcagacagtggctacgaaacagagaacttggagtctcccgagtggaccttgcatcccgctcccgagggcaccgcagactcagaaccagccaccacgggcgatggcggccacagcggtctgcctcccaacccggtcattgtcatctcagatgccggcgatggtcacagaggcacagaagtgacccctgagacgttcacagctggctcccagggttcataccgagactctgcgtacttctcagacaatgactctgagcccgagaaaaggtctgaggaggtcccgggaacctccccatccgccttggtgttggtacaggagcagcccctacccgagccagtcctccccgagcaaagtcctgctgcccaggatagctgcctggaagccagaaagagccagccagatgaaagttgtctgtctgctttgcacaactccagtgacctggaattaagagccacgccggagccagcacagactggtgttccccagcaggtgcatcccacggaagacgaggccagcagtccctggagtgtgctgaatgcagaacttagcagcggcgatgacttcgagacacaggacgatcgcccctgcaccctcgcttccacggggaccaacacgaacgaactccttgcctacaccaattctgcgctggacaagtccctgtccagccactccgagggcccgaagttgaaggagccggacatcgaagggaagtacctggggaaactcggggtgtcagggatgctcgacctctcagaggacgggatggatgcagacgaggaggacgaaaacagcgacgactcggacgaggacctgcgggccttcaacctgcatagcctcagctccgagtcggaggacgagaccgagcaccccgtgcccatcatcctcagcaacgaggacggaaggcacctgcggagtctgttgaagcccacagcggccaatgcccccgacccactgcccgaggactggaagaaggaaaagaaggcagtcacgtttttcgatgatgtcacagtctacctgtttgaccaggagaccccaaccaaagagctggggccctgtggaggagaggcgtgcggcccggacctgagcggcccagccccagcctcaggctctccctacctgagcaggtgcatcaactccgaaagctccaccgacgaagaaggtggtggctttgagtgggatgatgacttctccccagatccttttatgtcaaagacaacaagtaacctgctcagctccaagccttctctccaaacatccaagtacttttctccgccgccaccggcccggagcacggagcagagctggccgcactcggcgccttactcccggttctccatctctcccgccaacattgccagcttttccctcacacacctgaccgactcggacatcgagcagggcggaagcagcgaagacggagaaaaggactaggtggctgccaacgcgcacgctcgggtccgaggctgctcccctggagcggcgcccctgcgccctcagcccgagcagcgacatccactcgccatttgctgacatgagattgggaggaagaatccagaggtgaagagggagacggctcttagctgcgttcaaggcggggccctcgggagcccaggtgcagagcgaggccgtgtccaggagccggcgtccctcagtgccccgtgcacccgcggccgcggcctcccaggcagtgctcatgcgctggccgtcgggggaggcaggggcacagcctccatgtgcgcgcgcgtgtggagctgtgtgcaccgcatgtgtgctttccacaggggcgtctctgcgtccacgcctgcacatcccggcgcacgtgtgggcaccacagaggacacgtgaggggaatggtcaccagtgagccatatttattatttctagagaaatcacgaactgctttctgtaattgcactgtggataaatgttccgagagtctccattgttgtacaggatcttcagttattcgaggggaatgaggcaggtcaagccgatgctagccactagtttgattttttttctgttttatagtttgcgctgcatggtacttgtgaagcttaaatattttgagtgttctactgtgtctaggattgttgggattgtacatatggtactctttcataaatgataaatgattctgaatgttagtgttttatgttcatataggaaatattttcattgagtccaaaataccactgttttgttgatggacttgaatgcatttttgtctcttcttgatgaagcggctttgccgcagcaaatgaggcttctctctgaggagctgagaggtcttgcagcctctccttgtcattctcccaccccacatcccattttttaaagcccttttggtaaaaaccaacaggttgtggccgcagacctcagatggacccggcccatccctggggacgtgctggcgtggcaggtccagagagctgcaccctgcacggggcaccgcaccgcttccctccgcgcagctcttctgcctggttttcggaggccaggctgctgggaagcttccgtgttcctgtcagtccttccttcaagaagccggggaactcaggcagactcatctccgcagagcataccagccgtgggggaccgttcgacttgatgatgtgtgcacacttcaggtggtggggacttgagctttaaaaaaacctccacagccgaatcttctcctccgagccactccacgtcacgtccagctgggcctggccagtctgtggttatccatgtgggatgagataacaccacatcctgcagctgtgaagggggatggacaagggacgacggccgacggcagagcatcagcagccgacacatagttcgggtcggggccttgggtggtcctgcatggcccgggactcatctcacggaccctccgttctgcattaagccccaggttctcttctggctttgaaagggcccgagtgctcccagtgtagcttcgtcacatcgtcacgagcccctgtggtcatgggcgacctcacacctccctccctgagttctgctctgacataaggaagtcctcggtggctggtgcagcgcggctgtgctgtgctggggaggcagccgttccttcgggggtccttgggcctgcagtcccctcatactcacccttcacccaacatattttccggtgctgatatgtttccagactccagcgcaacctggggtgctctccagacccgtgcaggggccgcctggggtacacggaaggaagttgagtcctagtgcaaaatgcaggcggacgttgccagagagtgcgcagcaaatgaccttcattgccagttccaccctactcctctcattttttatactaagcaataactttccaaagcaagaagttcaggatggagagagtcccctcctgtgtaggcatggggtggatgcggtgcccacctgggctatgtggggagcaccactgtctcgggatgcgcgaattttttttttttttttaattaacagggcattagaagatgattttgccaaaattgtcatgactctgaattcttgctgtggggacttcctgagttttctcagtttttacatctaagattagtcttggctgaagagaaatgagacgtgattatactactttttcaattgcaggtttaaggagttcagatttaatgaccaaagtcatacagatcatggaatctgtcgtcgtcttatacagtgtcagcctcgagtacatttattaaccttttggggctgtcagttttccactaggattaagattttggccgggcgcggtggctcacgcctgcaatcccaacacattggggggtcgaggcggacggatcactttgagcccaggagttcaagaccagcctgggcaacatggcgaaacctcgtctctactaaaaatacaaaatatatatatatatatatatactagctggggcacatagtggtgtgcacctgtagtcccagctgcttgggaggctgaggtgggaggatggctagagcccaggagatgggtgttgcagtgagctgagaccatgccactgtactctagcctgggtaacagccagaccctgtctcaaaaaaaaaaacaatttttttcataacataattcccatttttatttattttgagtcactcataattaattgccaaaaaagcattttatacattgagttggggggtagtggatcttagtgtggtgttgcatggaggggcgagattttatatttataatcaacacgtgggttaacatgtttttttgaaatccaagcaatacacaggaaatttaagtagaataaaaattgcagcccatttttgaaatgtcagcatgtgctgtgttcagttcaggtttttgttgtttgttttgttattttttaactaataagttggttatcagtggtgggttttcaaaatgtacttgttctaataagttgtacaatgaactaaatcagtggcattctctagataatgtgggggaaggttagaatattttctggccttctatggggtagcaacccagaatcaatctgaattagtcctgttttggtggagtttgtacattttaaatcctataacaaaaataatctagttttcatttccttactagctagatgcgaatttgtctttttgaatgaccctgtcaataagccagaaagggcaacccagaaaaagtgctccccacatccttctgagacttggcctgtgtgtgtggacgagaagccattcaccgtaagggtgcagaaagctcgaccaagccgaattgcaaacaacgttcgttctatttttaaatgtacaggttcgatcgtttctatagaaatgggtttatctaagaaaagtcttggtttgtcttgctgctgtaaaaggcctttccaaacccctccttttattcctgtttcccgaaataaggtatttgtagagttaaggacctactgcatgcctgtccccagggccccggtggaaggaaggcagcgcctgctcttccttaactcagcccatcatctgaaaattcagaagtgaaccaagggttagacgccagaggttgggcttctgttagagtggcttcaaaacatgagccttatgggaagtagccttaaaaaaagaatgggtatacgcagtgacttccgatggaaatctccaaaacaatattcctaagtagcaatggggttggctcaagtctttattaacaaagaacattctctttcatctataaagaaattcttaaagatgcattgacagtgttgaattaccaacagcctgtgaagatcagtttgaccggtgtggacacgtgctggttaagcactcaggcctacgtgggccgagcgggatcttgatcatggggctggtgtatggatccaccgtcggattccgtctgcagaggaggacgtagggggccgtcacacccaccaggcctccctgctgtgctttaacacaggcagaagaggttcatggcaatataatagtcaatgaactttcagtttaaattgtgtacatttttaaattgtaagatttttactgtatattgatgcatagtgtgattcaataaattgcttgtaatttaaaaactatttaatattcaaaataaatatagttatatatttataaaaaaaaaaaaaaaaaa

SEQ ID NO: 421 - DNA, 1823 bp, Homo sapiens
  ref <308>: DATABASE ACCESSION NUMBER: NCBI / NM_014696
  ref <309>: DATABASE ENTRY DATE: 2011-08-13
  ref <313>: RELEVANT RESIDUES IN SEQ ID NO: (1)..(1823)
gcctttgctcctgagaagttgctgacaggtggaacctgaggcagcaggacagcctggcattggccacgggacatcggccacaaccatagcaacttcggcatcaaatggggcaggagagagaacattaaggcagccatgagctccagccgccccgagccgggtccctgggcacccctgagcccccgccttcagcccctgtcccagagctcttccagcctgctgggtgaaggccgggaacagaggccagagctccgcaagactgccagcagcaccgtgtggcaggcccagctgggcgaggccagcaccagaccccaggccccggaggaagaggggaacccgcctgagagcatgaagccagcacgggcctctggccccaaggcgcgacccagtgctggaggccactggtggagcagcactgtgggcaatgtgtccaccatgggcggcagtgacctgtgtcgcctgcgggcccctagtgctgctgctatgcagaggagccattcagacctggtccgtagcacccagatgcggggacacagtggtgctcggaaggccagtctcagctgctcagcccttggcagcagccctgtccacagggctcagctgcagccaggtggtacttctggccagggtggccaggcccctgcaggcctggaaagggacctggctcctgaggatgagacttctaactcagcctggatgctgggggcgagtcagttgtcagtgccaccactagacctgggggacacaactgcccacagcagcagtgcccaggctgagcccaaagctgctgaacagctggctaccaccacctgccatgctctgcccccagctgctctactctgtggcatgagggaggtgagggctggtggctgctgccatgccctacctgccacagggatcctggcctttcccaaactagtggcgtcagtgagcgagtctgggctgcaggctcagcatggggtgaagatccactgtaggttgtctggggggctccctgggcattcccattgctgtgcccacctttggggtcccgctgggttagtcccagagcctggctctaggaccaaagatgtgtggaccatgacctcagccaatgacttggcccctgcagaggcatccccgctgtcagcccaggatgctggtgtgcaggcggccccagtggcggcctgcaaggctgtggccaccagtccgtccctggaagcgcctgcagccctgcatgtgttcccagaggtaactctggggtccagcctggaggaggtgccgtcccctgtgcgggatgtgcgatgggatgctgagggcatgacatgggaggtgtacggagctgcggtggacctggaggtgctcggtgtggccatccagaagcacctggagatgcagtttgagcagctgcagcgggcgcccgccagcgaggacagcctgtctgtggagggccggagggggccactgcgggctgtcatgcagtccctgcggcgccccagctgctgcggctgctccggcgcggcccccgagtgaggagctgtggcccttggagctggcctgggcccactgacttagtcctagacctgggccagggacggtgggggctccgtgccccctggacccaccggcagctgggcacatctctcacctgaatattggctgcctccagaccacaggactgcagcctggggcttccggccctacacagctgggctgttttcttaagggcttgatttccaagggccacatctctgcaccttccgggctctgaactttgagacagggctttagcactgtgcagaggggagatcctgagttttctgtaaaaaatgaccttttgttca

SEQ ID NO: 422 - DNA, 8191 bp, Homo sapiens
  ref <308>: DATABASE ACCESSION NUMBER: NCBI / NM_014630
  ref <309>: DATABASE ENTRY DATE: 2011-11-19
  ref <313>: RELEVANT RESIDUES IN SEQ ID NO: (1)..(8191)
atgttgtggctcccgcagccggcgctggggacgcgcgcggccgagactctggcctgcagtcgccgccgccgccgccaggtggtgtttggactctagaccatgtgcctaggtagaagtttttcctttctccgcagctctgctcccctagcaacgctcgccacacccttgttttgagatcctctctaaggagcggagagtttaataggcaagaaggaagggagaagacagaaggaagacgctcccccgtacggagacagagggagggggggctccaaagccgaaagaggaggtccctacctgccacggataccagtcagcccttgccagcatccagccatgggggatatgaaaaccccagattttgatgaccttctggctgcctttgacatcccagaccccaccagccttgatgccaaggaggccatccagacacccagtgaggagaatgagagtcccctcaaacctccaggcatatgtatggatgaaagtgtgtccttgtctcactcaggatcagcccccgatgtgccggccgtgagtgtcattgtcaagaacaccagccgccaggagtcatttgaagcggagaaagaccacattactcccagtctcctacacaatggattccggggctcagatctgcctccagatccccacaactgtgggaaatttgattctacttttatgaatggagacagtgccaggagtttccctggcaaactggagcctcccaagtcagagccattacccaccttcaaccagttcagtccaatctccagcccagaacctgaggatcccatcaaagataacggatttgggataaagcccaaacactctgacagttatttcccaccccctcttgggtgcggggctgtgggaggcccagtcctggaggctctggctaagtttccggttccagagctgcatatgtttgatcatttttgtaagaaagaacccaagccagaacccctgcccttggggagccagcaggaacacgagcaaagtgggcagaacacagtggaacctcacaaggatccggatgccactcgattcttcggggaagctttggagttcaacagccatcctagcaacagtattggagagtccaaggggcttgcccgggagcttggtacctgctcatcagtcccccctaggcagcgtctaaagccagctcattccaagctgtcctcttgtgtggcagccttggtggccttgcaggccaaaagagtggctagtgtcactaaggaggatcagcctggccacacaaaggatctctcagggcccactaaagagagttctaaaggtagccccaaaatgcccaagtcaccaaagagtccccggagccctctggaggccactagaaaaagtatcaagccatcggacagccctcgtagcatctgcagtgacagcagcagcaaaggctcaccgtctgtggctgccagctccccaccagcaattcccaaagtgagaatcaaaaccattaagacatcatcaggggaaatcaaacggactgtcacaaggatcctgccagatcctgatgatccaagtaagtcccctgttgggtcacctctagggagcgccattgcagaggcccccagcgagatgccaggggatgaggtgcctgtggaagagcactttcctgaggcaggcacaaattcagggagcccccagggggccaggaaaggggacgagagcatgacaaaggccagtgactcgtcatctcccagctgcagttctgggccccgggtcccaaagggggctgccccaggctcacagacaggcaagaagcaacagagcacagcactgcaggcatccaccctggcccctgccaacctcctgcccaaagccgtgcacttggccaacctgaacctcgtcccccacagtgttgctgcatcagtgacagccaagtcttcagtgcaaagacggagccagccacagcttacacaaatgtcggtgcccctggtccaccaggtgaaaaaggctgccccactgattgtagaggtcttcaacaaggtccttcacagctccaaccccgtgcccctctatgcgccaaatctcagcccgcctgcggacagcaggatccacgtgccggccagtgggtactgctgcctggagtgtggagacgcatttgccttagagaagagcctgagccagcactatggccggcggagcgtccacattgaggtactgtgcacactgtgctccaagacgctgctcttcttcaacaagtgcagcctgctccggcacgcccgtgaccacaagagcaaggggctcgtcatgcagtgttcccagctgctggtgaagcctatctctgcggaccaaatgttcgtgtcggcccctgtgaactccacggcaccagcagccccagccccttcatcctctcccaaacatggcctcacttcgggcagtgccagtccccctcctccagccttgccactctacccagaccctgtgaggctcatccggtactcaatcaagtgtcttgaatgtcacaagcagatgcgggactacatggtcctggctgcacatttccagaggacaacagaggagacagaggggctgacctgccaggtatgccaaatgctgctgcccaaccagtgcagtttctgtgcccaccagcggattcatgcacacaagtccccctactgctgcccggagtgtggggtcctctgccgctctgcctacttccagacccatgtaaaggagaattgcctgcactatgcccgcaaggtgggctacaggtgcatccactgtggtgtcgtccacctgaccttggccttgctgaaaagccacatccaggagcgacactgccaggttttccacaaatgtgcattctgccccatggccttcaagactgccagcagcactgcagaccacagtgccacccagcaccccacccagccccacagaccctcccagctcatttataagtgctcctgtgaaatggtcttcaacaagaagaggcacattcagcagcatttttaccagaatgtcagcaagacgcaggtgggcgtcttcaagtgccctgagtgcccactcttgttcgtgcagaagccggagttgatgcaacacgtcaagagcacccacggtgttccccgaaatgtggacgagctgtcaagcctccagtcttcagcggacacatcctcaagccgccctggctctcgagttcccactgagccaccagccactagtgtggctgctcggagcagctccctgccttctggccgctggggtaggcctgaagcccaccgcagggtggaagccaggccgcggctgaggaacactggctggacctgccaggagtgccaggagtgggttccagatcgggagagctacgtgtcccacatgaaaaagagccacggtcggacattgaagcggtacccatgccggcagtgtgaacagtccttccacacccccaacagcctgcgcaaacacatccgcaacaaccatgacacagtaaagaagttctacacctgcgggtactgcacagaggacagccccagctttcctcggccctcccttctggagagccacatcagccttatgcatggcatcagaaaccctgatttgagccagacgtccaaagtgaaacctccgggtggacattcccctcaggtgaaccatctgaaaagaccagtcagtggagtgggggacgctccaggcaccagcaatggcgcaactgtctcttccaccaaaaggcacaagtccctttttcagtgcgcgaaatgtagttttgccacagactcggggctcgagtttcagagccacatacctcagcaccaggtggacagctccacagcccaatgtctcctctgtggtttgtgctacacctctgccagctccctcagccgccacctcttcattgtccacaaggtgagagaccaggaggaggaggaggaagaggaggcggcggcagcggagatggcagtggaggtggcagagccagaggagggctccggggaggaggtgcccatggagactagagagaatggactggaagaatgtgccggtgagcctttgtcagctgacccagaggcgaggagattgctgggcccggcccctgaggacgatggtggccacaatgatcacagtcaaccacaggcctctcaggaccaggacagccacacactgtcccctcaggtgtgaccggagactttgcagtgtgcatggtcaggggtggtgccgaagtgtcttccacctgccctgcggaccgtggaaaataaaaggctctgcccccagtgtgagtgtgaccggttgtaccctggagtagtgtctgccctgagctgccagtgctgggtatcccccagccccaggaaatgtggggtcggccaggaccctcacagctctgaatttgcttctgttatttatggcttttcgctgcttcttggtgccccatctcttgtctgtgtccttccaaccccaagctgcttatgtggcccaaccccactgctgtcaactaggcttgaaccccacagcggctgtgctcttctgggaggttcccgcttgctgccttcagccagggcgctcctcagagctctattttcctgcagacaccagctctccttcctgcctttagatcctgagaaggagggaaatgaggggtgctgacacagtccctctgggagagctctgcctagtctggtttggcgagggcccttgatcaccttgcccctcctccctgtcttctctgattcttttccctcaaaatagtcctgagaactaattgtcacactggctcatcatgtctctgtgggtggggtgggagaaacctctgctgcacacctctgtttggaacctgggcagagcaggaggtaaggcaaaggcaggcaggcaccaagaaccagaccccttgagaaggcgctgtgggtgggtctttgttctgctgttctgcctttcctgacaggtggggttggggcacacagacattggaatatttgtactgctctcgtgccatttgagaggctgctgccccaggcaggccagcccctactcctcttggctacactcatgttgctcagactatatttcaaataaaaaatcttctcaccatgcaggtaggctcttgtattcctctccaagtgagcctggccccaccctattccacccaagggtctttcccagacttcccctgtttgtcccatctctgagggagaacaatacttcctactgtctaaggaaggccttctctagattctggagcttgtggttaggaaaccgggagccctgtactacttagttctctagagaccttctgaaggggtgaggggagcggctccacaatggtcaagtcacctccaagatctccaggctagtgacattggctttagggcgtatcgaaattttctaggcaccttcatctttccttcagttgattttcaacataagagaaccccttactggtaaaaagggaaaagggggtggagaagaggaattttataattttcttatagcattcaagaggtttcttatttcttacagcatcgctactgccacagagaactcaaatgtggcagaactgggattagacttgggagactggctgtcttttcactgatggtggagtcagggcccacccaagcacgaggagcaggctgtgtggaggtgtcgtctgacctctaacccaggtggcatggggttgcgcccagcaggatgtagtggagtaaagggaagagggtgctggccgggtgcttagaggtcatctttcaaggaggcattaaatatcaattataaattattaagtcagataaatatgcctgaccttttcacagttgaaaaaatacattttttcccctctatcaaatgccaagtttttagtggaaatgctaatggcagtgggaaaggttgcctcactttcagagagactctcgctgtctgcacccttttaataattgctcttcctggcaaggctgccacttccctgcctccccagctggcagtggggcaacccaggcctgtttccagctacctgcaaagccagacctagacctgccgtagctgttgtcccatgcctaattctagttacaggaagccatccctgtaccctgggtccattcacaggaatgggttccagaggaggctgatagaagggtttgaaatgactggctggatcccttcctgctcagacacagtggtagctggagagcaggcagagatggtagaattgcaggtttgaccacctgtcgtgaccccagatatacatctccttcctgggaagaacgtgagttggaaaaatgctgagccagtccctggaaaacctgggtcctggcctggattctgtccttagccagctcttaacaaatcccttaacctcactgtctcctctccttcacaatagagttagtaattcccatccaactggcttcacaggcttttgtgagcttatgaatgtgaaagtattttctagtttataaaacactatatgaatgtggggaaatctttacttgaccttagggcatggagggtggagcacattttgtctgctgtttggacttggatgctgattagcagttatgaagtggcccagacacctagccattctttagtaagagtgaagatagcattttaagccctccttgtgtgcctagcatcttactgaacactttctggtgattctctcctttaatcctcacaaagatctcacagttgtcctccattttacggagaagaaaccgaggctccgagaggttaaacgatgtgcagaggctacctgtagtgatggtgctgagtcaagcctgtcaaccactgtgctcgttagtgaccaaggctgctttgacaggctgccagcttgtcagtggtttgcagccccccagacatttgctttcctacttcccatgcagttggggtgccctgccaagtgccaggttctctttggagtccatctgtgccttgtcaccccaaggagggcctcgagcatcacaccgttgacatttcgaaacgtggtatctctacaacctttcattctcattgggatttaccttgccatttgaacaccatcattttttgaggactgtctagaaaaggttgcctaaccctcacagggaacacacagttccctcagagtccagcatcttctggtcttttctttttcaagatttttttaaatggttgtgctatcatttgtcatcatcagaaaatgcttgctgtaacaagcgtttatctgcacattatgctgcagtgaatgctctactgatcaagttaaacagataagatcccttcccttgtagaaactacaacttaatacagtctaagacttgacaaattacttagtatttattttccaactgctttatctctgtaaaatgatatgctgaattattataagctaattgttgtagaaagaactttccccttaacttatgtaaacagtctggttttaaaaaatttgataattgtggcccagtaagctcaacactttgccttccccaagactggggaacctctgtcctgttcaccactgtatattcagcaccaggcagtttctttttttgtttgtttgtttttttgttttgaaaaattaatacatatacatggtaagacattccacaatacaaaagggtatacaataaatggtaagcttccccatggaggtcagcctctagtcccctctccagagttaatcactgttatctatatgttgtgtatcctttcatagcaattctatgcatttacaagtttataaatatgtatatttatatatctatttttaatacaaatagtagaattctatacacagtgttctgaagcttgctttcttatatagtattttggagattattccaaattcatacattgggtcagagtaattctttaaaagttccttgcatataacagtgattcaaaaagtatatggatgaatgagtgaatgctgcatgaatgaatgaatctgattcaattggtagctacagctgttctctcagggtctgatctgaccaagacagcaccttctagattctagaatgtgtcctcctgactaaggggttcaggatactgttcaccttctccaacagatgccaccggagccttaggaactgggcacaggaagccttgggcccctggaggaaaaagttgagactaggacgcaggtcccaagtatgggatttttttgggttcctacttaaaatgcttttttctttattggaaaatgatgtaacattttagagaaattaaaaagcacacatatttataaaaaaaaaaaaaa

SEQ ID NO: 423 - DNA, 2377 bp, Homo sapiens
  ref <308>: DATABASE ACCESSION NUMBER: NCBI / NM_014761
  ref <309>: DATABASE ENTRY DATE: 2011-12-18
  ref <313>: RELEVANT RESIDUES IN SEQ ID NO: (1)..(2377)
gaaccctgaagtcggtgtctgctgcgttcacggcaggattcggttaggaggaacagcacagcatgctgggctctggatttaaagctgagcgcttaagagtgaatttgagattagtcataaatcgccttaaactattggagaaaaagaaaacggaactggcccagaaagcaaggaaggagattgctgactatctggctgctgggaaagatgaacgagctcggatccgtgtggagcacattatccgggaagactacctcgtggaggccatggagatcctggagctgtactgtgacctgctgctggctcggtttggccttatccagtctatgaaggaactagattctggtctggctgaatctgtgtctacattgatctgggctgctcctcgactccagtcagaagtggctgagttgaaaatagttgctgatcagctctgtgccaagtatagcaaggaatatggcaagctatgtaggaccaaccagattggaactgtgaatgacaggctaatgcacaagctgagtgtggaagccccacccaaaatcctggtggagagatacctgattgaaattgcaaagaattacaacgtaccctatgaacctgactctgtggtcatggcagaagctcctcctggggtagagacagatcttattgatgttggattcacagatgatgtgaagaaaggaggccctggaagaggagggagtggtggcttcacagcaccagttggtggacctgatggaacggtgccaatgcccatgcccatgcccatgcctatgccatctgcaaatacgcctttctcatatccactgccaaagggaccatcagatttcaatggactgccaatggggacttatcaggcctttcccaatattcatccacctcagataccagcaactcccccatcgtatgaatctatgacattaatgctgataagaatatctcttctgcacagattgttggtcctggacccaagccagaagcctctgcaaagcttccttccagacctgcagataactatgacaactttgtcctaccagagttgccatctgtgccagacacactaccaactgcatctgctggtgccagcacctcagcatctgaagacattgactttgatgatctttcccggaggtttgaagagctgaaaaagaaaacataggtctcttaaaccaggcaactttcacgttttgggagttgagactgagcaatttctccttgtaacaaagaatctccatgaaattctgtttcatctgttaaccgtcactcagcacaacactccctctgggctctcttcctgctcctccagattctgctgctttccagttctctgttgatcctgagactaacaattggagactgaggccagagcaactggctcctggcagctgtgcttgtccgtttcctgtcagagtgatcccaggtttcctcctggcccgtcccatggtccctccacaggagtgtgagaggatgggggaagcactgtgggaagaccaccaaagatggctggacagtgggagagagcacgttgtgaagcatcccagcctcgtgttgaggttccagacttagaaacagacccctctgtacagggggattgtggtgagtgagaatcaaggccaccttgtgtgttttctcactctcgaatgcaagtgggagagggaaaatgactcgggacgccattgtaacggttcctggaagctgggccctctcattggcatatacagtactcctcgctgcagggcactgtcccaccgggatccagttgcaaagtttgtcttgacagttgaaggcctcgcttagttgtactggattctcagggagccctctgtggccttttgctttgcgtgctgtttcccttgtaccagagggcggcaccgtggaaattctgttttccctgtagcatattgtgttggattgcattactggcagagaaaggacaaggtgccattcaagtcctagggtgggcttccagctgccttaatagaagtactcaagtcttttgggtagtgagctggaaagcctacaggaaaagaggggtacctgttttcatttgaaaactttgattcatggaacctttaaaactaatctcagaaaaatttttggtgcccatgcagctgtagttgttcactgctttcctggatggatgggactcttatgtcataacttctgttactcctttggcccatagctaaggtcatccttccccacaggggtggctttgggattggatgatacagcttttgcttctgtgtagtatacctgtacatacttgtttcaggcagcctttctttaatgttttcagttggtttgtattctgtagctcagtagctgctaataaagttaaagatcctgaaaaaaaaaaaaaaaaaaaaaaaaaaaa

SEQ ID NO: 424 - DNA, 5397 bp, Homo sapiens
  ref <308>: DATABASE ACCESSION NUMBER: NCBI / NM_007286
  ref <309>: DATABASE ENTRY DATE: 2011-11-27
  ref <313>: RELEVANT RESIDUES IN SEQ ID NO: (1)..(5397)
aaaatcggttttcctgataaagagctgggctgagtcatctgtggaggagaaaagtcacatccagctccttcatgttgctgccgatgtgggattttcctggcttcgtcagccaagcaattggctgcctttgccggaggctttgagaaccaaggcttgaaggccggcaggagcatccagggggaagcttggcttcagggaggacctagcagacgttgggccggagcactagcctcacggagaaggatctgaaagaagccaaggcgcggagccagcagattgcagcccagctgaccacccctcccagctccaattcccgtggcgtccagctcttcaacaggcgccggcagagggtgaacgagttcaccttggagagccacggccagaggggacagaagcccagccaggagtccctcagagtgctcccttcaagcctcccaggccatgcaccggggctcagcctgagttccacctcgctgccggagccaggccctccacggcaccccagtccccagagccccgacagaggggtccctggccacagcatggaggggtactcagaggaggctagcttgctgcggcacctggagaaggtggccagtgaggaggaagaggtaccactggtggtttatctaaaggagaatgcagcactgctgacagccaatgggctgcacctgtcccaaaaccgagaggcccagcagtcctcaccggccccacctccagctgaggtccacagcccagctgcagatgtcaaccaaaaccttgcctcgcccagtgccacgctcaccacaccaacttctaacagcagccacaatccgccagccaccgatgtcaatcagaacccaccggcaactgttgtcccacagagcctgccactttctagcatccaacagaattcctcagaggcccaactcccatctaatggcacagggcctgcttccaaacccagcaccctgtgtgctgatgggcaaccccaggcaccggctgaggaggtgagatgcagcacactcctaattgacaaggtatcaactccagctaccaccaccagcaccttctccagagaagctacgctcatccccagctccaggcccccagcctcagatttcatgtccagctccctgctcattgacatccagcccaacaccctagtggtgtcagcagatcaagagatgtctgggcgagcagctgccaccacgcccaccaaggtctacagtgaggtccacttcacactggccaagcccccatcagtggtcaacaggacggccaggccttttgggatccaggcgccagggggcaccagccagatggagaggagccccatgctagagagacgacattttggggagaaggccccggctccccagccccccagtttgccagacaggagcccccggccacagagacacataatgtcccgcagccccatggtggaaaggaggatgatggggcagcgaagcccggcctcagagagacgccccttggggaacttcactgcaccccccacctacactgagaccttgtccacagcccctctggcttcctgggtgaggtctcctccctcatattctgtcctgtatcccagctccgaccccaagtcttctcatctgaagggccaggcggttcctgccagcaagacgggcattctggaggagtcgatggcccgccggggcagccgcaaatccatgtttactttcgtggagaagcccaaggtgaccccgaatccagacttgctggatctggtacagacagcggatgagaagcggcggcagagggaccagggggaggtaggcgtggaggaggagcccttcgcactgggggccgaggcctccaacttccagcaggagccagcacctcgtgacagggccagccccgcggcggcggaggaggtggtaccagagtgggcctcctgcctcaagtcaccccgcatccaggccaagccgaagcccaaacccaaccagaacctctccgaggcctctgggaagggagctgagctctacgcccgccgccagtcacggatggagaaatatgtcatcgagtcttcaagccacacgccagagctggcccgctgcccatcacctaccatgtccctgccttcctcctggaaataccccactaacgcccccggggccttccgagtggcatcccgaagcccagcccggaccccgcctgcctccctctaccatggctacctgcctgagaacggggtcctgcgcccagagcccaccaagcagccgccataccagctgcgcccctcgctctttgtcctctcacctatcaaggagcctgccaaggtctcaccaagagctgcctcgcccgccaagcccagctccttggacctggtgcccaacctgcccaagggggctctccctccatctcctgccctgcctcggccctcgcgctcctcaccgggcctctacacctcccccggccaggacagcctgcagcccactgccgtgagccctccttacggcggtgacatctcccccgtgtctccctccagggcgtggtctccccgagccaagcaggcccccaggccctccttctctacccggaacgccgggatcgaggctcaggaccgccgggagagcctgcccacctccccaccctggacgccgggcgcgtcccggccccccagcagcctagacggctgggtgagcccgggcccgtgggagccaggtcgcgggagcagcatgagcagccccccgccgctgccgccgccaccgcccatgtctccctcgtggagcgagcgctcggtgtccccgctgcgacctgagaccgaggcgcggccccccagccgccagctgcaggcgcttctggcgcgaaacatcatcaatgcggcccggcgcaagagcgcctccccgcggtcggcgggcgccgagaacccgcggcccttctccccgccgagggcgccaccgcccccgcccccgcccccgcccccgcccccgcgcatgcgctcgccacagcccgcccgccccggctcggctgctgtgccgggggcagccttcgcgcccatcccgcggagcccgttgcccgccggtccttcgtcctgcaccagtccccggagcccgctgcccgcgcctcccaggcccttcctctaccgccgctcgcccacggactccgacgtgtccctcgactccgaggactccggggctaagtctccaggcatcctgggctacaatatctgtccccgcgggtggaatggcagccttcggctcaagcgtggcagcctccccgccgaggcctcctgcaccacctagagccccacccccgaccccaccccgggagggcagagccagaagaaggctcattagacctgggggacccaaagggtctggcctctttgggcagccccagagatgaggggtcagcagaggagagctctggggttggggatgggttagggacgcaagcttgagttctagcccttgctctcattcagctgttgtgtgaccctgggtaagacccttccttgtttgaccctcagctttcccatctgtttaatggtggctttggccaaggcaatccacaaacgtcaaaattccccttcccatcagtacacacaccgatgcacacacactctctctttctctctctctctctctcacacacacacacacacacacacacacacacacacacacacacactagttagtgccttggatgaggcggggcagtgtgtatatggacccctggacttgctaccttcagggttccatactcgtccctcccctcctggctctgctgtctggagtctggcaagcggggtgtgttcagaaggtcctaggcctgtgtcgcatgtccaggcactggcctgaccatccggctccctggcaccaagtcccaggcaggagcagctgttttccatcccttcccagacaagctctatttttatcacaatgacctttagagaggtctcccaggccagctcaaggtgtcccactatcccctctggagggaagaggcaggaaaattctccccgggtccctgtcatgctactttctccatcccagttcagactgtccaggacatcttatctgcagccataagagaattataaggcagtgatttcccttaggcccaggacttgggcctccagctcatctgttccttctgggcccattcatggcaggttctgggctcaaagctgaactggggagagaagagatacagagctaccatgtgactttacctgattgccctcagtttggggttgcttattgggaaagagagagacaaagagttacttgttacgggaaatatgaaaagcatggccaggatgcatagaggagattctagcaggggacaggattggctcagatgacccctgagggctcttccagtcttgaaatgcattccatgatattaggaagtcgggggtgggtggtggtggtgggctagttgggcttgaatttaggggccgatgagcttgggtacgtgagcagggtgttaagttagggtctgcctgtatttctggtccccttggaaatgtccccttcttcagtgtcagacctcagtcccagtgtccatatcgtgcccagaaaagtagacattatcctgccccatcccttccccagtgcactctgacctagctagtgcctggtgcccagtgacctgggggagcctggctgcaggccctcactggttccctaaaccttggtggctgtgattcaggtccccaggggggactcagggaggaatatggctgagttctgtagtttccagagttggctggtagagccttctagaggttcagaatattagcttcaggatcagctgggggtatggaattggctgaggatcaaacgtatgtaggtgaaaggataccaggatgttgctaaaggtgagggacagtttgggtttgggacttaccggggtgatgttagatctggaacccccaagtgaggctggagggagttaaggtcagtatggaagatagggttgggacagggtgctttggaatgaaagagtgaccttagagggctccttgggcctcaggaatgctcctgctgctgtgaagatgagaaggtgctcttactcagttaatgatgagtgactatatttaccaaagcccctacctgctgctgggtcccttgtagcacaggagactggggctaagggcccctcccagggaagggacaccatcaggcctctggctgaggcagtagcatagaggatccatttctacctgcatttcccagaggactagcaggaggcagccttgagaaaccggcagttcccaagccagcgcctggctgttctctcattgtcactgccctctccccaacctctcctctaacccactagagattgcctgtgtcctgcctcttgcctcttgtagaatgcagctctggccctcaataaatgcttcctgcattcttctgcctcctgtgtcattttc

SEQ ID NO: 425 - DNA, 1134 bp, Homo sapiens
  ref <308>: DATABASE ACCESSION NUMBER: NCBI / NM_007263
  ref <309>: DATABASE ENTRY DATE: 2011-08-14
  ref <313>: RELEVANT RESIDUES IN SEQ ID NO: (1)..(1134)
gacgtgtctttcaggaagaggagctggtgagaagacagcgaaatggcgcctccggcccccggcccggcctccggcggctccggggaggtagacgagctgttcgacgtaaagaacgccttctacatcggcagctaccagcagtgcataaacgaggcgcagcgggtgaagctatcaagcccagagagagacgtggagagggacgtcttcctgtatagagcgtacctggcgcagaggaagttcggtgtggtcctggatgagatcaagccctcctcggcccctgagctccaggccgtgcgcatgtttgctgactacctcgcccacgagagtcggagggacagcatcgtggccgagctggaccgagagatgagcaggagcgtggacgtgaccaacaccaccttcctgctcatggccgcctccatctatctccacgaccagaacccggatgccgccctgcgtgcgctgcaccagggggacagcctggagtgcacagccatgacagtgcagatcctgctgaagctggaccgcctggacctcgcccggaaggagctgaagagaatgcaggacctggacgaggatgccaccctcacccagctcgccactgcctgggtcagcctggccacgggtggtgagaagctgcaggatgcctactacatcttccaggagatggctgacaagtgctcgcccaccctgctgctgctcaatgggcaggcggcctgccacatggcccagggccgctgggaggccgctgagggcctgctgcaggaggcgctagacaaggatagtggctacccagagacgctggtcaacctcatcgtcctgtcccagcacctgggcaagccccctgaggtgacaaaccgatacctgtcccagctgaaggatgcccacaggtcccatcccttcatcaaggagtaccaggccaaggagaacgactttgacaggctggtgctacagtacgctcccagcgcctgaggctggcccagagctgtcaggaccatgaagccaggacagaggccaggagccagccctgcagccctccccacccggcatccacctgcatcccctctgggggcaggagcccacccccagcacccccatctgttaataaatatctcaactccagggtgttccacctga

SEQ ID NO: 426 - DNA, 1208 bp, Homo sapiens
  ref <308>: DATABASE ACCESSION NUMBER: NCBI / NM_006349
  ref <309>: DATABASE ENTRY DATE: 2011-11-20
  ref <313>: RELEVANT RESIDUES IN SEQ ID NO: (1)..(1208)
ggcggcgacagggagggaggaagcctaggagtccgccgcgggacggaggcctgggggaactgggagttcagctttctgcagagggccactaggaacctcggattgcccacggaagccagccactttctttgacagtccagcccacctcctcttctgcccggagaagctccaggggctgcctttgtgatcacagcatcttcacaaggaccaaaggaaaataagatttcttgtaagaacaccgtgaccacatctttaaaatgacccatttcgtggctcccacaagatttacacctccacactgaggccggaagtggttttgcccctataaaacatggcgaaaagctttcttgtctccaaggaaacgccacgtaatgagtcaaagctgtggcgcacgcgcagaagtacaagctaccggaagtgatggcgcccctactaaagccttggggttagtacgcgtgcgcagcagtttcttccgacagttgtgttgtgccaatggtggagaagaaaacttcggttcgctcccaggaccccgggcagcggcgggtgctggaccgggctgcccggcagcgtcgcatcaaccggcagctggaggccctggagaatgacaacttccaggatgacccccacgcgggactccctcagctcggcaagagactgcctcagtttgatgacgatgcggacactggaaagaaaaagaagaaaacccgaggtgatcattttaaacttcgcttccgaaaaaactttcaggccctgttggaggagcagaacttgagtgtggccgagggccctaactacctgacggcctgtgcgggacccccatcgcggccccagcgccccttctgtgctgtctgtggcttcccatccccctacacctgtgtcagctgcggtgcccggtactgcactgtgcgctgtctggggacccaccaggagaccaggtgtctgaagtggactgtgtgagcctgggcattcccagagaggaagggccgctgtgcactgcccggccttcagaaagacagaatttcatcacccaatgcagggggagctcttcctggaccaagggaggagccgctcattcacccaacaaaactgtgtcttatctgccaggaaagaccagcctcactcctgggaactgtctggcaggtaggctgggccccccagtgctgttagaataaaaagcctcgtgccggaaaaaaaaaaaaaaaaaaaaa

SEQ ID NO: 427 - DNA, 546 bp, Homo sapiens
  ref <308>: DATABASE ACCESSION NUMBER: NCBI / NM_006004
  ref <309>: DATABASE ENTRY DATE: 2011-11-21
  ref <313>: RELEVANT RESIDUES IN SEQ ID NO: (1)..(546)
ctgaactgggttaggtgccgctgttgctgctcgtgttgaatctagaaccgtagccagacatgggactggaggacgagcaaaagatgcttaccgaatccggagatcctgaggaggaggaagaggaagaggaggaattagtggatcccctaacaacagtgagagagcaatgcgagcagttggagaaatgtgtaaaggcccgggagcggctagagctctgtgatgagcgtgtatcctctcgatcacatacagaagaggattgcacggaggagctctttgacttcttgcatgcgagggaccattgcgtggcccacaaactctttaacaacttgaaataaatgtgtggacttaattcaccccagtcttcatcatctgggcatcagaatatttccttatggttttggatgtaccatttgtttcttatttgtgtaactgtaagttcacatgaacctcatgggtttggcttaggctggtagcttctatgtaattcgcaatgattccatctaaataaaagttctatgatctgcaaaaaaaaaaaaaaaaaaaaaa

SEQ ID NO: 428 - DNA, 1550 bp, Homo sapiens
  ref <308>: DATABASE ACCESSION NUMBER: NCBI / NM_005787
  ref <309>: DATABASE ENTRY DATE: 2011-11-27
  ref <313>: RELEVANT RESIDUES IN SEQ ID NO: (1)..(1550)
ggtgggcccacacaagcggcgcaccgttaagatggcggctgggctgcggaaacgcggccggtccggttccgcggcccaggcagagggactctgcaagcaatggctgcagcgcgcctggcaagagcggcgcctgctgctgcgggagccgcgctacacgctgctggtggccgcctgcctctgcctggcggaggtgggcatcaccttctgggtcattcacagggtggcatacacagagattgactggaaggcctacatggccgaggtagaaggcgtcatcaatggtacctatgactatacccaactgcagggtgacaccggaccacttgtgtacccagctggtttcgtgtacatctttatggggttgtactatgccaccagccgaggcactgacatccgcatggcccagaacatctttgctgtgctctacctggctaccttgctgcttgtcttcttgatctatcaccagacctgcaaggtacctcccttcgtctttttcttcatgtgctgcgcctcttaccgtgtccactccatctttgtgctgcggctcttcaatgacccagtggccatggtgctgctcttcctcagtatcaacctcctgctggcccagcgctggggctggggttgctgctttttcagcctggcagtctctgtgaagatgaatgtgctgctcttcgcccctgggttactgtttcttctcctcacacagtttggcttccgtggggccctccccaagctgggaatctgtgctggccttcaggtggtgctggggctgcccttcctgctggagaaccccagcggctacctgtcccgctcctttgaccttggccgccagtttctgttccactggacagtgaactggcgcttcctcccagaggcgctcttcctgcatcgagccttccacctggccctgttgactgcccacctcaccctgctcctgctgtttgccctctgcaggtggcacaggacaggggaaagtatcttgtcgctgctgagggatccctccaaaaggaaggttccaccccagccccttacacccaaccagatcgtttctaccctcttcacctccaacttcattggcatctgcttcagccgctccctccactaccagttctacgtctggtatttccacacactgccctacctcctgtgggccatgcctgcacgctggctcacacacctgctcaggttgttggtgctggggctcatcgagctctcctggaacacatacccttccacatcctgcagctctgctgccctgcacatatgccatgccgtcatcctgctgcagctctggctgggcccgcagcctttccccaagagcacccaacacagcaagaaagcccactgaagtccacccctttccctcaggacctgagtctaccctcaggacctggggttggttggactctgcccttccaaataaaccttgctaagtccaactctgtgcaacctacatggaggtgggggcagccgatgcctggtccaggctgtgagggacacgtatggagcagataaagaattcactcaagcagtaaaaaaaaaaaaaaaaa

SEQ ID NO: 429 - DNA, 1429 bp, Homo sapiens
  ref <308>: DATABASE ACCESSION NUMBER: NCBI / NM_012412
  ref <309>: DATABASE ENTRY DATE: 2011-08-15
  ref <313>: RELEVANT RESIDUES IN SEQ ID NO: (1)..(1429)
aagacaagcgggcattggccacagcagcgcgaggcgggcacggggtattgtccggctccggcggcggcggtcggtgctgcgagagcggcggcggcggcgcgggtcggcagcgggagggcgcgcggccgagcggaggcggagtcggcgccgagaacatggctggaggcaaagctggaaaggacagtgggaaggccaaggctaaggcagtatctcgctcacagagagctgggctacagtttcctgtgggccgcatccacagacacttgaagactcgcaccacaagccatggaagggtgggtgccactgctgccgtgtacagtgctgcgattctggagtacctcactgcagaggtgctggagctggcaggtaatgcttctaaggatctcaaagtaaagcgtatcactccgcgtcacttgcagcttgcaatccgtggtgatgaagagttggattctcttatcaaggctaccatagctgggggtggtgtgatccctcacatccacaaatctctgattggaaagaagggacagcagaaaactgcttagagggatgctttaaccaaccctcttcctccccgtcattgtactgtaactgggacagaagaaataatggggatatgtggaatttttaacaacagttaaatggaaaagcatagacaattactgtagacatgataaaagaaacatttgtatgttcttagactcgaagtttgataaaagtaccttttcatgtggtgacagttgtgtgttgattggctaggtttctcccgtgtgttttatacaaaaatggaattgataaaccattttttacaaaattaatttgtctcaaaactgttctgttcatgatgtattagaaatattttactcagactttaaatattttaaatctcagattggttattcagagtaaccttagaacagaaattgggaatatatctttacaatgattgataccatggtatattgactcttagatgctattgatctgtagcaccattttttacaaacgactaaggaaaaaacctgccaattaaatcatgatatgccatcaattatgagacatcccaatttgagagatgttagattatagaaaagtatgcatttatgactgaaatggtagtggaattatttgaattctacaccaagcacttaccatgtgccaggccctttgcagagtgctctactgaccaagaaagttgttgctgccacattatagatgtggagcctaagggtcacagaaattgtgtgctatgccaaaaaacattgaactggtagatagaaaatgacagagctaggattcaaacctagatctggctgactccagagcctagttttacctggaattgatgttcagtttatcaaaggtttctccttttggtttaaaatcccaatttttggcctggcattgtggtttacgcctgtaatcccaacac

SEQ ID NO: 430 - DNA, 6356 bp, Homo sapiens
  ref <308>: DATABASE ACCESSION NUMBER: NCBI / NM_012401
  ref <309>: DATABASE ENTRY DATE: 2011-10-22
  ref <313>: RELEVANT RESIDUES IN SEQ ID NO: (1)..(6356)
ccttggcggcggacgtgcagagaatctcgatgctggcctggagcagaaactgagctggaccactggagcctcggtgagggggtgcggggggcaatggcactgcagctctgggccctgaccctgctgggcctgctgggcgcaggtgccagcctgaggccccgcaagctggacttcttccgcagcgagaaagagctgaaccacctggctgtggatgaggcctcaggcgtggtgtacctgggggcggtgaatgccctctaccagctggatgcgaagctgcagctggagcagcaggtggccacgggcccggccctggacaacaagaagtgcacgccgcccatcgaggccagccagtgccatgaggctgagatgactgacaatgtcaaccagctgctgctgctcgaccctcccaggaagcgcctggtggagtgcggcagcctcttcaagggcatctgcgctctgcgcgccctgagcaacatctccctccgcctgttctacgaggacggcagcggggagaagtctttcgtggccagcaatgatgagggcgtggccacagtggggctggtgagctccacgggtcctggtggtgaccgcgtgctgtttgtgggcaaaggcaatgggccacacgacaacggcatcatcgtgagcactcggctgttggaccggactgacagcagggaggcctttgaagcctacacggaccacgccacctacaaggccggctacctgtccaccaacacacagcagttcgtggcggccttcgaggacggcccctacgtcttctttgtcttcaaccagcaggacaagcacccggcccggaaccgcacgctgctggcacgcatgtgcagagaagaccccaactactactcctacctggagatggacctgcagtgccgggaccccgacatccacgccgctgcctttggcacctgcctggccgcctccgtggctgcgcctggctctggcagggtgctatatgctgtcttcagcagagacagccggagcagtggggggcccggtgcgggcctctgcctgttcccgctggacaaggtgcacgccaagatggaggccaaccgcaacgcctgttacacaggcacccgggaggcccgtgacatcttctacaagcccttccacggcgatatccagtgcggcggccacgcgccgggctccagcaagagcttcccatgtggctcggagcacctgccctacccgctgggcagccgcgacgggctcagaggcacagccgtgctgcagcgtggaggcctgaacctcacggccgtgacggtcgccgccgagaacaaccacactgttgcttttctgggcacctctgatggccggatcctcaaggtgtacctcaccccagatggcacctcctcagagtacgactctatccttgtggagataaacaagagagtcaagcgcgacctggtactgtctggagacctgggcagcctgtacgccatgacccaggacaaggtgttccggctgccggtgcaggagtgcctgagctacccgacctgcacccagtgccgcgactcccaggacccctactgcggctggtgcgtcgtcgagggacgatgcacccggaaggccgagtgtccgcgggccgaggaggccagccactggctgtggagccgaagcaagtcctgcgtggccgtcaccagcgcccagccacagaacatgagccggcgggcccagggggaggtgcagctgaccgtcagccccctccctgccctgagcgaggaggacgagttgctgtgcctttttggggagtcgccgccacaccccgcccgcgtggagggcgaggccgtcatctgcaactccccaagcagcatccccgtcacaccgccaggccaggaccacgtggccgtgaccatccagctcctccttagacgaggcaacatcttcctcacgtcctaccagtaccccttctacgactgccgccaggccatgagcctggaggagaacctgccgtgcatctcctgcgtgagcaaccgctggacctgccagtgggacctgcgctaccacgagtgccgggaggcttcgcccaaccctgaggacggcatcgtccgtgcccacatggaggacagctgtccccagttcctgggacccagccccctggtgatccccatgaaccacgagacagatgtgaacttccagggcaagaacctggacaccgtgaagggttcctccctgcacgtgggcagtgacttgctcaagttcatggagccggtgaccatgcaggaatctgggaccttcgcctttcggaccccaaagctgtcccacgatgccaacgagacgctgcccctgcacctctacgtcaagtcttacggcaagaatatcgacagcaagctccatgtgaccctctacaactgctcctttggccgcagcgactgcagcctgtgccgggccgctaaccccgactacaggtgtgcgtggtgcgggggccagagcaggtgcgtgtatgaggccctgtgcaacaccacctccgagtgcccgccgcccgtcatcaccaggatccagcctgagacgggccccctgggtgggggcatccgcatcaccatcctggggtccaatttgggcgtccaagcaggggacatccagaggatctctgtggccggccggaactgctcctttcagccggaacgttactccgtgtccacccggatcgtgtgtgtgatcgaggctgcggagacgcctttcacggggggtgtcgaggtggacgtcttcgggaaactgggccgttcgcctcccaatgtccagttcaccttccaacagcccaagcctctcagtgtggagccgcagcagggaccgcaggcgggcggcaccacactgaccatccacggcacccacctggacacgggctcccaggaggacgtgcgggtgaccctcaacggcgtcccgtgtaaagtgacgaagtttggggcgcagctccagtgtgtcactggcccccaggcgacacggggccagatgcttctggaggtctcctacggggggtcccccgtgcccaaccccggcatcttcttcacctaccgcgaaaaccccgtactgcgagccttcgagccgctacgaagctttgccagtggtggccgcagcatcaacgtcacgggtcagggcttcagcctgatccagaggtttgccatggtggtcatcgcggagcccctgcagtcctggcagccgccgcgggaggctgaatccctgcagcccatgacggtggtgggtacagactacgtgttccacaatgacaccaaggtcgtcttcctgtccccggctgtgcctgaggagccagaggcctacaacctcacggtgctgatcgagatggacgggcaccgtgccctgctcagaacagaggccggggccttcgagtacgtgcctgaccccacctttgagaacttcacaggtggcgtcaagaagcaggtcaacaagctcatccacgcccggggcaccaatctgaacaaggcgatgacgctgcaggaggccgaggccttcgtgggtgccgagcgctgcaccatgaagacgctgacggagaccgacctgtactgtgagcccccggaggtgcagcccccgcccaagcggcggcagaaacgagacaccacacacaacctgcccgagttcattgtgaagttcggctctcgcgagtgggtgctgggccgcgtggagtacgacacacgggtgagcgacgtgccgctcagcctcatcttgccgctggtcatcgtgcccatggtggtcgtcatcgcggtgtctgtctactgctactggaggaagagccagcaggccgaacgagagtatgagaagatcaagtcccagctggagggcctggaggagagcgtgcgggaccgctgcaagaaggaattcacagacctgatgatcgagatggaggaccagaccaacgacgtgcacgaggccggcatccccgtgctggactacaagacctacaccgaccgcgtcttcttcctgccctccaaggacggcgacaaggacgtgatgatcaccggcaagctggacatccctgagccgcggcggccggtggtggagcaggccctctaccagttctccaacctgctgaacagcaagtctttcctcatcaatttcatccacaccctggagaaccagcgggagttctcggcccgcgccaaggtctacttcgcgtccctgctgacggtggcgctgcacgggaaactggagtactacacggacatcatgcacacgctcttcctggagctcctggagcagtacgtggtggccaagaaccccaagctgatgctgcgcaggtctgagactgtggtggagaggatgctgtccaactggatgtccatctgcctgtaccagtacctcaaggacagtgccggggagcccctgtacaagctcttcaaggccatcaaacatcaggtggaaaagggcccggtggatgcggtacagaagaaggccaagtacactctcaacgacacggggctgctgggggatgatgtggagtacgcacccctgacggtgagcgtgatcgtgcaggacgagggagtggacgccatcccggtgaaggtcctcaactgtgacaccatctcccaggtcaaggagaagatcattgaccaggtgtaccgtgggcagccctgctcctgctggcccaggccagacagcgtggtcctggagtggcgtccgggctccacagcgcagatcctgtcggacctggacctgacgtcacagcgggagggccggtggaagcgcgtcaacacccttatgcactacaatgtccgggatggagccaccctcatcctgtccaaggtgggggtctcccagcagccggaggacagccagcaggacctgcctggggagcgccatgccctcctggaggaggagaaccgggtgtggcacctggtgcggccgaccgacgaggtggacgagggcaagtccaagagaggcagcgtgaaagagaaggagcggacgaaggccatcaccgagatctacctgacgcggctgctctcagtcaagggcacactgcagcagtttgtggacaacttcttccagagcgtgctggcgcctgggcacgcggtgccacctgcagtcaagtacttcttcgacttcctggacgagcaggcagagaagcacaacatccaggatgaagacaccatccacatctggaagacgaacagcttaccgctccggttctgggtgaacatcctcaagaacccccacttcatctttgacgtgcatgtccacgaggtggtggacgcctcgctgtcagtcatcgcgcagaccttcatggatgcctgcacgcgcacggagcataagctgagccgcgattctcccagcaacaagctgctgtacgccaaggagatctccacctacaagaagatggtggaggattactacaaggggatccggcagatggtgcaggtcagcgaccaggacatgaacacacacctggcagagatttcccgggcgcacacggactccttgaacaccctcgtggcactccaccagctctaccaatacacgcagaagtactatgacgagatcatcaatgccttggaggaggatcctgccgcccagaagatgcagctggccttccgcctgcagcagattgccgctgcactggagaacaaggtcactgacctctgacctacaatctccagtgctgccttgggacataggtacctgaggtacctgagagcccctcaggggaggaggccgagtggctgtggctgaggcccccaccctcccctggaacgcgccccaagccggagtgggtgcagccggaacccgcccagcgtctagactgtagcatcttcctctgagcaataccgccgggcaccgcaccagcaccagccccagccccagctccctccggccgcagaaccagcatcgggtgttcactgtcgagtctccagtgatttgaaaatgtgccttacgctgccacgctgggggcagctggcctccgcctccgcccacgcaccagcagccgcctccatgccctaggttgggcccctgggggatctgagggcctgtggcccccagggcaagttcccagatcctatgtctgtctgtccaccacgagatgggaggaggagaaaaagcggtacgatgccttcctgacctcaccggcctccccaagggtgccggcactctgggtggactcacggctgctgggccccacgtcaaaggtcaagtgagacgtaggtcaagtcctacgtcggggcccagacatcctggggtcctggtctgtcagacaggctgccctagagccccacccagtccggggggactgggagcagttccaagaccaccccacccctttttgtaaatcttgttcattgtaaatcaaatacagcgtctttttcactctgaaaaaaaaaaaaaaaaaaaaa

SEQ ID NO: 431 - DNA, 979 bp, Homo sapiens
  ref <308>: DATABASE ACCESSION NUMBER: NCBI / NM_007262
  ref <309>: DATABASE ENTRY DATE: 2011-12-18
  ref <313>: RELEVANT RESIDUES IN SEQ ID NO: (1)..(979)
tgagtctgcgcagtgtggggctgagggaggccggacggcgcgcgtgcgtgctggcgtgcgttcattttcagcctggtgtggggtgagtggtacccaacgggccggggcgccgcgtccgcaggaagaggcgcggggtgcaggcttgtaaacatataacataaaaatggcttccaaaagagctctggtcatcctggctaaaggagcagaggaaatggagacggtcatccctgtagatgtcatgaggcgagctgggattaaggtcaccgttgcaggcctggctggaaaagacccagtacagtgtagccgtgatgtggtcatttgtcctgatgccagccttgaagatgcaaaaaaagagggaccatatgatgtggtggttctaccaggaggtaatctgggcgcacagaatttatctgagtctgctgctgtgaaggagatactgaaggagcaggaaaaccggaagggcctgatagccgccatctgtgcaggtcctactgctctgttggctcatgaaataggttttggaagtaaagttacaacacaccctcttgctaaagacaaaatgatgaatggaggtcattacacctactctgagaatcgtgtggaaaaagacggcctgattcttacaagccgggggcctgggaccagcttcgagtttgcgcttgcaattgttgaagccctgaatggcaaggaggtggcggctcaagtgaaggctccacttgttcttaaagactagagcagcgaactgcgacgatcacttagagaaacaggccgttaggaatccattctcactgtgttcgctctaaacaaaacagtggtaggttaatgtgttcagaagtcgctgtccttactacttttgcggaagtatggaagtcacaactacacagagatttctcagcctacaaattgtgtctatacatttctaagccttgtttgcagaataaacagggcatttagcaaactaaaaaaaaaaaaaaaaaaa

SEQ ID NO: 432 - DNA, 1416 bp, Homo sapiens
  ref <308>: DATABASE ACCESSION NUMBER: NCBI / NM_007273
  ref <309>: DATABASE ENTRY DATE: 2011-12-17
  ref <313>: RELEVANT RESIDUES IN SEQ ID NO: (1)..(1416)
aagttcgggtccgtagtgggctaagggggagggtttcaaagggagcgcacttccgctgccctttctttcgccagccttacgggcccgaaccctcgtgtgaagggtgcagtacctaagccggagcggggtagaggcgggccggcacccccttctgacctccagtgccgccggcctcaagatcagacatggcccagaacttgaaggacttggcgggacggctgcccgccgggccccggggcatgggcacggccctgaagctgttgctgggggccggcgccgtggcctacggtgtgcgcgaatctgtgttcaccgtggaaggcgggcacagagccatcttcttcaatcggatcggtggagtgcagcaggacactatcctggccgagggccttcacttcaggatcccttggttccagtaccccattatctatgacattcgggccagacctcgaaaaatctcctcccctacaggctccaaagacctacagatggtgaatatctccctgcgagtgttgtctcgacccaatgctcaggagcttcctagcatgtaccagcgcctagggctggactacgaggaacgagtgttgccgtccattgtcaacgaggtgctcaagagtgtggtggccaagttcaatgcctcacagctgatcacccagcgggcccaggtatccctgttgatccgccgggagctgacagagagggccaaggacttcagcctcatcctggatgatgtggccatcacagagctgagctttagccgagagtacacagctgctgtagaagccaaacaagtggcccagcaggaggcccagcgggcccaattcttggtagaaaaagcaaagcaggaacagcggcagaaaattgtgcaggccgagggtgaggccgaggctgccaagatgcttggagaagcactgagcaagaaccctggctacatcaaacttcgcaagattcgagcagcccagaatatctccaagacgatcgccacatcacagaatcgtatctatctcacagctgacaaccttgtgctgaacctacaggatgaaagtttcaccaggggaagtgacagcctcatcaagggtaagaaatgagcctagtcaccaagaactccacccccagaggaagtggatctgcttctccagtttttgaggagccagccaggggtccagcacagccctaccccgccccagtatcatgcgatggtcccccacaccggttccctgaacccctcttggattaaggaagactgaagactagccccttttctgggaaattactttcctcctccctgtgttaactggggctgttggggacagtgcgtgatttctcagtgatttcctacagtgttgttccctccctcaaggctgggaggagataaacaccaacccaggaattctcaataaatttttattacttaacctg

SEQ ID NO: 433 - DNA, 2594 bp, Homo sapiens
  ref <308>: DATABASE ACCESSION NUMBER: NCBI / NM_021009
  ref <309>: DATABASE ENTRY DATE: 2011-12-24
  ref <313>: RELEVANT RESIDUES IN SEQ ID NO: (1)..(2594)
aggggccgcggagccgcggctaaggaacgcgggccgcccacccgctcccggtgcagcggcctccgcgccgggttttggcgcctcccgcgggcgcccccctcctcacggcgagcgctgccacgtcagacgaagggcgcagcgagcgtcctgatccttccgcccggacgctcaggacagcggcccgctgctcataagactcggccttagaaccccagtatcagcagaaggacattttaggacgggacttgggtgactctagggcactggttttctttccagagagcggaacaggcgaggaaaagtagtcccttctcggcgattctgcggagggatctccgtggggcggtgaacgccgatgattatataaggacgcgccgggtgtggcacagctagttccgtcgcagccgggatttgggtcgcagttcttgtttgtggatcgctgtgatcgtcacttgacaatgcagatcttcgtgaagactctgactggtaagaccatcaccctcgaggttgagcccagtgacaccatcgagaatgtcaaggcaaagatccaagataaggaaggcatccctcctgaccagcagaggctgatctttgctggaaaacagctggaagatgggcgcaccctgtctgactacaacatccagaaagagtccaccctgcacctggtgctccgtctcagaggtgggatgcaaatcttcgtgaagacactcactggcaagaccatcacccttgaggtcgagcccagtgacaccatcgagaacgtcaaagcaaagatccaggacaaggaaggcattcctcctgaccagcagaggttgatctttgccggaaagcagctggaagatgggcgcaccctgtctgactacaacatccagaaagagtctaccctgcacctggtgctccgtctcagaggtgggatgcagatcttcgtgaagaccctgactggtaagaccatcaccctcgaggtggagcccagtgacaccatcgagaatgtcaaggcaaagatccaagataaggaaggcattccttctgatcagcagaggttgatctttgccggaaaacagctggaagatggtcgtaccctgtctgactacaacatccagaaagagtccaccttgcacctggtactccgtctcagaggtgggatgcaaatcttcgtgaagacactcactggcaagaccatcacccttgaggtcgagcccagtgacactatcgagaacgtcaaagcaaagatccaagacaaggaaggcattcctcctgaccagcagaggttgatctttgccggaaagcagctggaagatgggcgcaccctgtctgactacaacatccagaaagagtctaccctgcacctggtgctccgtctcagaggtgggatgcagatcttcgtgaagaccctgactggtaagaccatcactctcgaagtggagccgagtgacaccattgagaatgtcaaggcaaagatccaagacaaggaaggcatccctcctgaccagcagaggttgatctttgccggaaaacagctggaagatggtcgtaccctgtctgactacaacatccagaaagagtccaccttgcacctggtgctccgtctcagaggtgggatgcagatcttcgtgaagaccctgactggtaagaccatcactctcgaggtggagccgagtgacaccattgagaatgtcaaggcaaagatccaagacaaggaaggcatccctcctgaccagcagaggttgatctttgctgggaaacagctggaagatggacgcaccctgtctgactacaacatccagaaagagtccaccctgcacctggtgctccgtcttagaggtgggatgcagatcttcgtgaagaccctgactggtaagaccatcactctcgaagtggagccgagtgacaccattgagaatgtcaaggcaaagatccaagacaaggaaggcatccctcctgaccagcagaggttgatctttgctgggaaacagctggaagatggacgcaccctgtctgactacaacatccagaaagagtccaccctgcacctggtgctccgtcttagaggtgggatgcagatcttcgtgaagaccctgactggtaagaccatcactctcgaagtggagccgagtgacaccattgagaatgtcaaggcaaagatccaagacaaggaaggcatccctcctgaccagcagaggttgatctttgctgggaaacagctggaagatggacgcaccctgtctgactacaacatccagaaagagtccaccctgcacctggtgctccgtctcagaggtgggatgcaaatcttcgtgaagaccctgactggtaagaccatcaccctcgaggtggagcccagtgacaccatcgagaatgtcaaggcaaagatccaagataaggaaggcatccctcctgatcagcagaggttgatctttgctgggaaacagctggaagatggacgcaccctgtctgactacaacatccagaaagagtccactctgcacttggtcctgcgcttgagggggggtgtctaagtttccccttttaaggtttcaacaaatttcattgcactttcctttcaataaagttgttgcattcccaaaaaaaaaaaa

SEQ ID NO: 434 - DNA, 1584 bp, Homo sapiens
  ref <308>: DATABASE ACCESSION NUMBER: NCBI / NM_023009
  ref <309>: DATABASE ENTRY DATE: 2011-11-27
  ref <313>: RELEVANT RESIDUES IN SEQ ID NO: (1)..(1584)
ggcattctggcgcggagcggagcggcggcgggcgcagctagcgggtcggccgcggagcggaggtgcagctcggcttcccccggcacccctccccctcgggcgccagccccacccctccgccggccgggccgaccccgccgtactatcccctgcggcgcgagcccggggcggctccaagcgccccccagcagacccccatcatgggcagccagagctccaaggctccccggggcgacgtgaccgccgaggaggcagcaggcgcttcccccgcgaaggccaacggccaggagaatggccacgtgaaaagcaatggagacttatcccccaagggtgaaggggagtcgccccctgtgaacggaacagatgaggcagccggggccactggcgatgccatcgagccagcaccccctagccagggtgctgaggccaagggggaggtcccccccaaggagacccccaagaagaagaagaaattctctttcaagaagcctttcaaattgagcggcctgtccttcaagagaaatcggaaggagggtgggggtgattcttctgcctcctcacccacagaggaagagcaggagcagggggagatcggtgcctgcagcgacgagggcactgctcaggaagggaaggccgcagccacccctgagagccaggaaccccaggccaagggggcagaggctagtgcagcctcagaagaagaggcagggccccaggctacagagccatccactccctcggggccggagagtggccctacaccagccagcgctgagcagaatgagtagctaggtaggggcaggtgggtgatctctaagctgcaaaaactgtgctgtccttgtgaggtcactgcctggacctggtgccctggctgccttcctgtgcccagaaaggaaggggctattgcctcctcccagccacgttccctttcctcctctccctcctgtggattctcccatcagccatctggttctcctcttaaggccagttgaagatggtcccttacagcttcccaagttaggttagtgatgtgaaatgctcctgtccctggccctacctccttccctgtccccacccctgcataaggcagttgttggttttcttccccaattcttttccaagtaggttttgtttaccctactccccaaatccctgagccagaagtggggtgcttatactcccaaaccttgagtgtccagccttcccctgttgtttttagtctcttgtgctgtgcctagtggcacctgggctggggaggacactgccccgtctaggtttttataaatgtcttactcaagttcaaacctccagcctgtgaatcaactgtgtctcttttttgacttggtaagcaagtattaggctttggggtggggggaggtctgtaatgtgaaacaacttcttgtctttttttctcccactgttgtaaataacttttaatggccaaaccccagatttgtactttttttttttttctaactgctaaaaccattctcttccacctggttttactgtaacatttggaaaaggaataaatgtcgtccctttaaaaaaaaaaaaaaaaaaaaaagaaaaaaaaaaaaaaaa

SEQ ID NO: 435 - DNA, 2622 bp, Homo sapiens
  ref <308>: DATABASE ACCESSION NUMBER: NCBI / NM_015456
  ref <309>: DATABASE ENTRY DATE: 2011-11-26
  ref <313>: RELEVANT RESIDUES IN SEQ ID NO: (1)..(2622)
ggtgcggggcggaagtgggcggctgcgggacgcgcgcggagtcgcgcggcgggcgggacctggccgagctggagggcgccggggagcggggctcgggcggtccccgaggcccggcggagcgggcttctggggtgtctgcggcggcgccgggggaacgggctggggatggggcgcctagccgggcggtggccggggcctcggccatgttcgcggggctgcaggacctgggcgtggccaacggcgaggacctgaaggagaccctgaccaactgcacggagccgctcaaggccatcgagcagttccagacagagaatggtgtgctgctgccatctcttcagtcagccctccccttcttggacctgcacgggacgccgcggctggagttccaccagtcggtattcgatgagctgcgggacaagctgctggagcgagtgtcagccatcgcttcggaggggaaggctgaggaaaggtacaagaagctggaagaccttctggagaagagcttttctctggtgaagatgccgtccctgcagcccgtggtgatgtgcgtcatgaagcacctgcccaaggttccggagaaaaaactgaagctggttatggctgacaaggagctgtatcgagcctgcgccgtggaggtgaagcggcagatctggcaagacaaccaggccctcttcggggacgaggtttccccactcctgaagcagtacatcctggagaaggagagcgctctcttcagtacagagctctctgtcctgcacaactttttcagtccttcccccaagaccaggcgccagggcgaggtggtgcagcggctgacgcggatggtggggaagaacgtgaagctgtacgacatggtgctgcagtttctgcgcacgctcttcctgcgcacgcggaatgtgcactactgcacgctgcgggctgagctgctcatgtccctgcacgacctggacgtgggtgaaatctgcaccgtggacccgtgccacaagttcacctggtgcctggacgcctgcatccgagagcggttcgtggacagcaagagggcgcgggagctgcaggggtttctcgatggcgtcaagaagggccaggagcaggtgctgggggacctgtccatgatcctgtgtgaccccttcgccatcaacacgctggcactgagcacagtcaggcacctgcaggagctggtcggccaggagacactgcccagggacagccccgacctcctgctgctgctccggctgctggcgctgggccagggagcctgggacatgatcgacagccaggtcttcaaggagcccaagatggaggtagagctcatcaccaggttcctcccgatgctcatgtccttcctggtggatgactacactttcaatgtggatcagaaacttccggctgaggagaaagccccagtctcatatccaaacacacttcccgaaagcttcactaagtttctgcaggagcagcgcatggcctgcgaggtggggctgtactacgtcctgcacatcaccaagcagaggaacaagaacgcgctcctccgcctgctgcccgggctggtggagacctttggcgacttggcctttggcgacatcttcctccacctgctcacgggcaaccttgcgctgctggccgacgaatttgcccttgaggacttctgcagcagcctcttcgatggcttcttcctcaccgcctctccaaggaaggagaacgtgcaccggcacgcgctgcggctcctcattcacctgcaccccagggtggccccgtctaagctggaggcgttgcagaaggccctggagcctacaggccagagcggagaggcagtgaaggagctttactcccagctcggcgagaagctggaacagctggatcaccggaagcccagcccggcacaggctgcggagacgccggccctggagctgcccctccccagcgtgcccgcccctgccccgctctgagggccctccagacctgctcgggtgctggggccatgccgagtcgcggccctgctcagccggaagaggctcccggacctggatgtacagggcagtctctcttcccggggctatggctgggcctgtcctgccgtcatggccccctgcttcctgctccttggagctggctcccggaccttgcccaccatccatgcagtggctcccagggcagagcctctccttgtactttggcagccatagaaagcgtgctcattttctgttttcctgtgttaggaaaaaaccacctgttttccaaggggagagggcggggcctgagggtgggggcggggcctcttcattggcccagcttggcgaaagcgaggcacactgcttactgccttggggttgtggagatggacccgtgacctcgtggaggccgtgtgggggcagcagcctggcctgtgccatggtgggtgtcctggggcctgtgcggagggagccacctcaccctgcagcccagtttgcaggtgtggccttgtttctccttgcccagcagtgctgccttcagcggccgtgacggggccagctggacacacggtgagattttctcgtatgtaaataaaaggcattttggtaaacgtggaaaaaaaaaaaaaaaaaaaaaaaaaaaaaaaaaaaaaaaaaaaaaaaaaaaaaaaaa

SEQ ID NO: 436 - DNA, 1793 bp, Homo sapiens
  ref <308>: DATABASE ACCESSION NUMBER: NCBI / NM_005053
  ref <309>: DATABASE ENTRY DATE: 2011-11-19
  ref <313>: RELEVANT RESIDUES IN SEQ ID NO: (1)..(1793)
ccggaagtggtcggcgcgcggcgcggcgcgcctgggcgctaagatggcggcggcgtgagttgcatgttgtgtgaggatcccggggccgccgcgtcgctcgggccccgccatggccgtcaccatcacgctcaaaacgctgcagcagcagaccttcaagatccgcatggagcctgacgagacggtgaaggtgctaaaggagaagatagaagctgagaagggtcgtgatgccttccccgtggctggacagaaactcatctatgccggcaagatcttgagtgacgatgtccctatcagggactatcgcatcgatgagaagaactttgtggtcgtcatggtgaccaagaccaaagccggccagggtacctcagcacccccagaggcctcacccacagctgccccagagtcctctacatccttcccgcctgcccccacctcaggcatgtcccatcccccacctgccgccagagaggacaagagcccatcagaggaatccgcccccacgacgtccccagagtctgtgtcaggctctgttccctcttcaggtagcagcgggcgagaggaagacgcggcctccacgctagtgacgggctctgagtatgagacgatgctgacggagatcatgtccatgggctatgagcgagagcgggtcgtggccgccctgagagccagctacaacaacccccaccgagccgtggagtatctgctcacgggaattcctgggagccccgagccggaacacggttctgtccaggagagccaggtatcggagcagccggccacggaagcagcaggagagaaccccctggagttcctgcgggaccagccccagttccagaacatgcggcaggtgattcagcagaaccctgcgctgctgcccgccctgctccagcagctgggccaggagaaccctcagcttttacagcaaatcagccggcaccaggagcagttcatccagatgctgaacgagccccctggggagctggcggacatctcagatgtggagggggaggtgggcgccataggagaggaggccccgcagatgaactacatccaggtgacgccgcaggagaaagaagctatagagaggttgaaggccctgggcttcccagagagcctggtcatccaggcctatttcgcgtgtgaaaaaaatgagaacttggctgccaacttcctcctgagtcagaactttgatgacgagtgatgccaggaagccaggccaccgaagcccccaccctacccttattccatgaaagttttataaaagaaaaaatatatatatattcatgtttatttaagaaatggaaaaaaaaatcaaaaatcttaaaaaaacaagcaaacagtccagcttcctgtcctcctaaagtggcccctgttcccatctcccgggccagacagctgtccccccgtcctcctccccagcccagcctgctcagagaagctggcaggactgggaggcgacagatgggcccctcttggcctctgtcccagctctctgcagccagacggaaaggcggctgcttgcctctccatcctccgaaaaacccctgaggacccccccccatcctcttctaggatgaggggaagctggagccccaactttgatcctccattggagtggcccaaatctttccatctagggcaagtcctgaaaggcccaaggccccctccccagtctggccttggcctccagcctggagaagggctaacatcagctcattgtcaaggccacccccaccccagaacagaaccgtgtctctgataaaggttttgaagtgaataaagttttaaaaact

SEQ ID NO: 437 - DNA, 1335 bp, Homo sapiens
  ref <308>: DATABASE ACCESSION NUMBER: NCBI / NM_006830
  ref <309>: DATABASE ENTRY DATE: 2011-11-27
  ref <313>: RELEVANT RESIDUES IN SEQ ID NO: (1)..(1335)
cgcgccgcggccgcgcctgcgcagtgtagccgggtcagctggacagggtcatcctgagggtgcgactccgccgcgatggtgacccggttcctgggcccacgctaccgggagctggtcaagaactgggtcccgacggcctacacatggggcgctgtgggcgccgtggggctggtgtgggccaccgattggcggctgatcctggactgggtaccttacatcaatggcaagtttaagaaggataattaattacacaaacccttcacagactgctctggtgcctggtggtgctagctcctcccacctcagcacctgctgcatctggagcagcccaagcctcaggatggacaagaggaaacccacagctcagcttcaggcttcttatgtttctgaaaacagcttggatattttaatgcacgttgcattaaacctcactgaaacctgctccgtgcccggatgttgatcatgctggtggcttggttactgtgactgtagctggagtggcacaggtgacccaggcgtcctttcagctccagaatgttgcaagtctaggagagtgttccaatggctgacagaaactgcctatttgaaatggctcataagtagtatctgcagtgtgttcatccgttgctgccttaacaagtcacccacacgtagtggcttaaagcaacgaacattcactctctcacagtctgtgtcagtcggggatttgggagtgatgtatctgggtggttgtggcccagagtctctcatgaggttgcagttaagacatcagccaaggccacttcgtctgaggaaggctcaactggggctggagccacttccaagccagtgccctcacgtggctgtcggtgacagccacagttccttcccatgggggcccctacacgaagctgcttgagcatcctcacggcatggcctctgccttccccagagcaggtgaaccaagggagaggaaggagcaagccacagtgcttctatgagccaccctgagaagtctcacgtgatcacttccgccacagcctgtttatcaaaagcaagccccccaggcccagcccacgtgcagagggaggagaatgaggttctgtgttttgaagggaagaatatcagaattggtagacatttcaaactgtcacattagggatacaaaaatgaacaggctgggagtggtggctcagcctacaatcccaacactttgggaggctgaggaaggggcatcacttgaaccaggagttcagtactaacctgggcaacaaagaggcccctgtctctgataaaaagaaaaaaaatgaaaaaataaaaatgaacaggtataaaaagagaatatggtacaaagtc

SEQ ID NO: 438 - DNA, 3839 bp, Homo sapiens
  ref <308>: DATABASE ACCESSION NUMBER: NCBI / NM_005682
  ref <309>: DATABASE ENTRY DATE: 2011-12-15
  ref <313>: RELEVANT RESIDUES IN SEQ ID NO: (1)..(3839)
agacaggcggagcctcacctggggctgcccgccagcccagacaagctcagactgggtgcctgtggccctgggaggaggtggaaggggaggagcaggccacacaggcacaggccggtgagggacctgcccagacctggagggtctcgctctgtcacacaggctggagtgcagtggtgtgatcttggctcatcgtaacctccacctcccgggttcaagtgattctcatgcctcagcctcccgagtagctgggattacaggtggtgacttccaagagtgactccgtcggaggaaaatgactccccagtcgctgctgcagacgacactgttcctgctgagtctgctcttcctggtccaaggtgcccacggcaggggccacagggaagactttcgcttctgcagccagcggaaccagacacacaggagcagcctccactacaaacccacaccagacctgcgcatctccatcgagaactccgaagaggccctcacagtccatgcccctttccctgcagcccaccctgcttcccgatccttccctgaccccaggggcctctaccacttctgcctctactggaaccgacatgctgggagattacatcttctctatggcaagcgtgacttcttgctgagtgacaaagcctctagcctcctctgcttccagcaccaggaggagagcctggctcagggccccccgctgttagccacttctgtcacctcctggtggagccctcagaacatcagcctgcccagtgccgccagcttcaccttctccttccacagtcctccccacacggccgctcacaatgcctcggtggacatgtgcgagctcaaaagggacctccagctgctcagccagttcctgaagcatccccagaaggcctcaaggaggccctcggctgcccccgccagccagcagttgcagagcctggagtcgaaactgacctctgtgagattcatgggggacatggtgtccttcgaggaggaccggatcaacgccacggtgtggaagctccagcccacagccggcctccaggacctgcacatccactcccggcaggaggaggagcagagcgagatcatggagtactcggtgctgctgcctcgaacactcttccagaggacgaaaggccggagcggggaggctgagaagagactcctcctggtggacttcagcagccaagccctgttccaggacaagaattccagccaagtcctgggtgagaaggtcttggggattgtggtacagaacaccaaagtagccaacctcacggagcccgtggtgctcactttccagcaccagctacagccgaagaatgtgactctgcaatgtgtgttctgggttgaagaccccacattgagcagcccggggcattggagcagtgctgggtgtgagaccgtcaggagagaaacccaaacatcctgcttctgcaaccacttgacctactttgcagtgctgatggtctcctcggtggaggtggacgccgtgcacaagcactacctgagcctcctctcctacgtgggctgtgtcgtctctgccctggcctgccttgtcaccattgccgcctacctctgctccagggtgcccctgccgtgcaggaggaaacctcgggactacaccatcaaggtgcacatgaacctgctgctggccgtcttcctgctggacacgagcttcctgctcagcgagccggtggccctgacaggctctgaggctggctgccgagccagtgccatcttcctgcacttctccctgctcacctgcctttcctggatgggcctcgaggggtacaacctctaccgactcgtggtggaggtctttggcacctatgtccctggctacctactcaagctgagcgccatgggctggggcttccccatctttctggtgacgctggtggccctggtggatgtggacaactatggccccatcatcttggctgtgcataggactccagagggcgtcatctacccttccatgtgctggatccgggactccctggtcagctacatcaccaacctgggcctcttcagcctggtgtttctgttcaacatggccatgctagccaccatggtggtgcagatcctgcggctgcgcccccacacccaaaagtggtcacatgtgctgacactgctgggcctcagcctggtccttggcctgccctgggccttgatcttcttctcctttgcttctggcaccttccagcttgtcgtcctctaccttttcagcatcatcacctccttccaaggcttcctcatcttcatctggtactggtccatgcggctgcaggcccggggtggcccctcccctctgaagagcaactcagacagcgccaggctccccatcagctcgggcagcacctcgtccagccgcatctaggcctccagcccacctgcccatgtgatgaagcagagattcggcctcgtcgcacactgcctgtggcccccgagcccggcccagccccaggccagtcagccgcagactttggaaagcccaacgaccatggagagatgggccgttgccatggtggacggactcccgggctgggcttttgaattggccttggggactactcggctctcactcagctcccacgggactcagaagtgcgccgccatgctgcctagggtactgtccccacatctgtcccaacccagctggaggcctggtctctccttacaacccctgggcccagccctcattgctgggggccaggccttggatcttgagggtctggcacatccttaatcctgtgcccctgcctgggacagaaatgtggctccagttgctctgtctctcgtggtcaccctgagggcactctgcatcctctgtcattttaacctcaggtggcacccagggcgaatggggcccagggcagaccttcagggccagagccctggcggaggagaggccctttgccaggagcacagcagcagctcgcctacctctgagcccaggccccctccctccctcagccccccagtcctccctccatcttccctggggttctcctcctctcccagggcctccttgctccttcgttcacagctgggggtccccgattccaatgctgttttttggggagtggtttccaggagctgcctggtgtctgctgtaaatgtttgtctactgcacaagcctcggcctgcccctgagccaggctcggtaccgatgcgtgggctgggctaggtccctctgtccatctgggcctttgtatgagctgcattgcccttgctcaccctgaccaagcacacgcctcagaggggccctcagcctctcctgaagccctcttgtggcaagaactgtggaccatgccagtcccgtctggtttccatcccaccactccaaggactgagactgacctcctctggtgacactggcctagggcctgacactctcctaagaggttctctccaagcccccaaatagctccaggcgccctcggccgcccatcatggttaattctgtccaacaaacacacacgggtagattgctggcctgttgtaggtggtagggacacagatgaccgacctggtcactcctcctgccaacattcagtctggtatgtgaggcgtgcgtgaagcaagaactcctggagctacagggacagggagccatcattcctgcctgggaatcctggaagacttcctgcaggagtcagcgttcaatcttgaccttgaagatgggaaggatgttctttttacgtaccaattcttttgtcttttgatattaaaaagaagtacatgttcattgtagagaatttggaaactgtagaagagaatcaagaagaaaaataaaaatcagctgttgtaatcacctagcaaactggaaaaaaaaaaaaaaa

SEQ ID NO: 439 - DNA, 8207 bp, Homo sapiens
  ref <308>: DATABASE ACCESSION NUMBER: NCBI / NM_012102
  ref <309>: DATABASE ENTRY DATE: 2011-11-21
  ref <313>: RELEVANT RESIDUES IN SEQ ID NO: (1)..(8207)
agacgctcgcgagcaaccctccgcgctccggagcctcctcagcctcccgcacaccccgagacgctcgccccgctgggcctcggtccccgcctcctcccccgtccttttcccctctctcgctccccacattgtctctgcctcattttctctcctagttgaggattaaaaaaaaaaaaaaatcaccatcatcctcagggagccccctcgccctcggaaaacaaaaccagacatgatcctgggctcctgcttctgaaagatctgcccgaccgaggaggagggagcctaggttcaagtcgcaggaaaggtcacggcagggaagccccctcagcccctccgcgtcgcctccccgcgggccgcccctctcggccctgcgccccgcggccccgcagcctccgcgcggcctcccgccccatccccgccactttccccggagctgggccgcgaacacctcactattgatggtgtagcgctttaggggaaggaggtgattgtctaggagtaactgtatgtgcgctcagcaccgggtcacaaccaccgtgggatccacttacagagaagatttgtggagagcttcagcctgtttatggtgttactgagaaaggaattgtggccatttgatataattctggatggaagacctcttatttgtattacattgaattagagcatttttgaaacgttggggttgttggagtggttggattttccctggaattgagtgagaaattcagaagactgaagcccaggcttactgtctacctttcacggaggcctagccgtgagaggacagaagaaggcacgtggcgaatcatgacagcggacaaagacaaagacaaagacaaagagaaggaccgggaccgagaccgggaccgagagagagagaaaagagacaaagcaagagagagtgagaattcaaggccacgccggagctgtaccttggaaggaggagccaaaaattatgctgagagtgatcacagtgaagacgaggacaatgacaacaatagtgccaccgcagaggagtccacgaagaagaataagaagaaaccaccgaaaaaaaagtctcgttatgaaaggacagataccggtgagataacatcctacatcactgaagatgatgtggtctacagaccaggagactgtgtgtatatcgagagtcggaggccaaacacaccgtatttcatctgtagcattcaagacttcaaactggtccacaactcccaggcctgttgcagatctccaactcctgctttgtgtgaccccccagcatgctctctgccggtggcatcacagccaccacagcatctttctgaagccgggagagggcctgtagggagtaagagggaccatctcctcatgaacgtcaaatggtactaccgtcaatctgaggttccagattctgtgtatcagcatttggttcaggatcgacataatgaaaatgactctggaagagaacttgtcattacagacccagttatcaagaaccgagagctcttcatttctgattacgttgacacttaccatgctgctgcccttagagggaagtgtaacatctcccatttttctgacatatttgctgctagagagtttaaagcccgagtggattcatttttctacatattaggatataaccctgagacaaggaggctgaacagtacccagggggagattcgtgtcggtcctagtcatcaggccaaacttccagatctgcaaccatttccttctccagatggtgatacagtgacccaacatgaggaactggtctggatgcctggagttaacgactgtgacctccttatgtacttgagggcagcaaggagcatggcggcatttgcaggaatgtgtgatggaggctctacagaggacggctgtgtcgcagcctctcgggatgacaccactctgaatgcactgaacacactgcatgaaagcggttacgatgctggcaaagccctgcagcgcctggtgaagaagcctgtgcccaagctcatcgagaagtgctggaccgaggacgaagtgaaacgcttcgttaagggactcaggcagtacgggaagaacttcttcagaattagaaaggagctgcttcccaataaggaaacaggggagctgatcaccttctattactattggaagaagacccccgaagcagccagctcccgagcccatcgtaggcaccgcaggcaggccgtgttcaggaggattaagactcgcaccgcgtccacacccgtcaacacaccctccagacccccgtccagtgaattcttggacctaagttcagccagtgaagatgacttcgacagtgaggacagtgagcaggagctgaaggggtacgcctgccgccactgcttcaccaccacctccaaagattggcaccacggaggccgggagaacatcctgctttgcaccgactgtcgcatccacttcaagaaatacggtgagctcccgcccattgagaagcccgtggacccgccaccgtttatgttcaaacccgtcaaggaagaggatgatgggctcagtgggaagcatagcatgaggacacggcggagtcggggctcgatgtcgacactacgcagtggtcggaagaagcagccagccagccctgatggtcgcacctcacccatcaatgaagacatccgctccagcggccggaactcccccagcgctgccagtacctccagcaatgacagtaaagcagagacagtgaagaagtcggccaagaaggtgaaggaggaagcctcttcccctcttaagagtaacaaacgccagcgggagaaggtggcctctgatacggaggaggctgacaggaccagctccaagaagacaaaaacgcaggagatcagcaggcccaactcgccatctgaaggtgagggagagagttcagacagtcgcagcgtcaacgatgagggtagcagtgaccccaaagacatcgaccaggacaatcgcagcacgtccccgagcatccccagcccccaggacaatgagagtgactcggactcgtcagcccagcagcagatgctgcaggcccagcccccagccttgcaggctcccactggggtcaccccagctccctcctcagctcctccagggacccctcagctgcccacgccagggcccacgccctctgccactgcagttcccccacagggctcccccacggcctcccaggcccctaaccagccacaggctcccacagcgcctgttccccacacccacatccaacaggcaccggccttgcacccccagcggccgccctcaccgcatcccccgccgcatccctcgccacatcccccgctgcagcctctgactgggtcggcgggccagccttctgcaccctctcatgcccagcccccactgcacggtcagggcccacccggccctcacagcctgcaggctgggcccctgctgcagcacccaggccccccacagccctttggcctccctccccaggcctcccaaggccaggcccctctggggacctccccagcagcagcgtaccctcacacctccctgcagctgccagcctctcagtcagcgctgcagtcccaacagcctccacgggagcagcccctgccaccagcgcccttggccatgccccacatcaagcccccgcctaccactcccatcccccagctgccggcgccacaggcccacaagcaccctccccacctctcggggccctcacccttctccatgaatgccaacctgcctccccctccagccctgaagcccctgagctccctgtccacacatcaccccccgtcggctcaccccccacccctgcaactcatgcctcagagccagccattgccctcctcgcccgcccagccccccgggctgacccagagccagaacctgcccccgccccctgcctcccacccccctacaggcctccaccaggtggccccccaacccccgtttgctcagcacccctttgtccctggaggccctcctcccatcacccctccgacctgcccctccacctctaccccaccggcgggacctggcacctcggcccagccaccctgctctggtgcggcggcttcaggaggcagcatagcgggggggtcgtcctgcccactccccaccgtccagatcaaggaggaggctctggacgacgctgaggagcctgagagcccccctcccccaccaaggagcccgtccccggagcccactgtggtggacacccccagtcacgccagccagtcagctaggttctacaaacacctggaccggggctacaactcgtgtgcccggacagacctgtacttcatgcctctggccgggtccaagctggccaagaagagggaggaggccattgagaaggccaagcgcgaggctgagcagaaagcccgagaggagcgagagcgggagaaggagaaggagaaggagcgggagcgggagcgagagcgggagcgcgaggcagagcgggcggctaaggcgtccagctcagcgcatgaaggtcgcctcagtgacccacagctcagtggtcctggccacatgcggccatccttcgagccaccaccaaccaccattgctgctgtgcccccctacatcgggcccgacacacctgcccttcggactctgagcgagtacgcccggccccacgtcatgtcgcccaccaaccgcaaccaccccttctacatgccccttaaccccacggaccccctgctggcctaccacatgcctggcctctacaacgtcgaccccaccatccgcgagcgggagctccgggagcgggagatccgagagcgggagatccgagagcgggagctgcgggagaggatgaagccgggcttcgaggtgaagcccccagagctggaccccctgcacccagccgccaaccccatggagcactttgcccggcacagcgccctcaccatccccccgaccgccgggccccacccttttgcttctttccacccgggcctgaaccccttggagagggagagactggccctggcgggcccccagctgcggcccgagatgagctaccctgacagactggcagccgagcgtatccacgcagagcgcatggcatcgctgaccagcgatcccctggcccgactgcagatgttcaacgtgactccgcaccatcaccagcactctcacattcactcccacctccacctccaccagcaggaccccctccaccaaggttcagcaggccccgttcacccgctggtcgaccccctgactgccggtccccacctggctcgcttcccctacccgcctggcactctccccaaccctctgcttggacagcccccacacgagcacgagatgcttcgccacccagttttcggcaccccctacccccgtgacctgcctggggccatcccaccccccatgtcagcagcccaccagctgcaggccatgcatgcccagtcggccgagctgcagagactggccatggagcagcagtggctgcatggacacccccacatgcatggtggccacctaccaagtcaggaagattattacagtcgactgaagaaagaaggtgacaagcagttataagttatttatttgttaacgctggctgtggaaaccccagttcttggggggagaaacaggactttttacataaaataggagctgcaaaagcaaaaagaatatcttctaaagatttctttatatatttaaaaacccacaactaaaaatgtatccacatagtagtgttcgtttgtcgagaggatttcctgagactggtttggatctccctgcatgacagtcccccagaaacttagtgagtcctggactggactgaacatccagaaagcttccctgcaatcttggggtttggctttagttttcttttccttgatttctcagtaggtgctagaatccagttcacacccttcactgtgcgtgcagacacactgacacactccgccacgagtgctccagagcccacgaggcttgcagatcgggggcataggaatttggaatccaagagctataatttttaaaaaaaaaaatcttttattttaatacattgtaggaaatcttcataattggagaaagttctgcagcatggctttttacgtctgtaaataaataattttagaacagcctttttttcttccataaactactattgtgatctattttttccagccatgtcactaattgtgaattcctaccaactattgacagaatacagagttgattttttaataaaaagttatatataattatccctttaattaaagggagcaaaggggcgttccacatggacagaggcttggaccgaggcctggtcacagcagcgagcatccagggtttgcagggacgatgttacagactctgttttctgcctggcgtttcacttgtgtctgctcctagcctgtgctctgccagcagcacagacatctgctccatcagacctcttccattttgcacagggagtgcaggaggtgaatgttcactttctgttctccagtgtcactgttctgtttccacgggatggaaagcgcatgggcctgtgtccattgtagatttccttctagatttctgtgtacacacacttgattgttctggatgaatgtcttttttaatactccgaaaatttcatcatctaagaaaatgattccatacaaataactcagcacacaagtgacccaggacatatgcctgccaaagggatgtgttagaaggctgccttctcatgcgcattgtcacttggatcttgtggtgaggacggccccatctttcttgccacagattgaggccacttttgagcaagggagatcctggagttaagacaggtgttgggggcagcctgtattttaccctaggggcaggtctgcatggtgaccccacattgcactggtaaaccatttgagtcccactcttcatcctggaagtgggaactggagtcccacccacagtgcattcagaaagcatgctgtgtgggggctgcttctcaggaggccaggcccttctgagcggaaccgtcctggagagagcctgccctcgtttccaggctgcagccgtaacgcactttctcccaggctgagggcgggtgttctggggtgtctgccctctgtcggccctgcttcctgccaggacgtggcctcttccgatccttttctctcagacactggaggtctcttctgccattgtgctggtcccatcccaagaattgtaggacagagaccacactgggtcggcggacacaaagtccatccaggacccaggccgcagagggagcaggaagagatgctgatagtttgatctagaaaccagcagctactggctcaaattcaggttctggcgtcaaatagcgacatttccagtttctcttaaaaaccgtgtttggtttcagttgggataggcttgttttgtctgttgaaaatgtttctagttttttttctttcatttttctctcattccatttctgccttaactttagtttgttcacagggaggcaaagctgacatgaaccttttgtcgtgggacttcaggccacattggcttgaaggcattcgtttccttctggggtggggacaggccctcatggcaggcttgttcccgtggctctgagcgaggcctcttcctgctgggctcccagactcctgcatccaggcccccaccttctcggcttctggtttttctttctttttggtagaacacaacatctaccattcagttaaaccttctttatctcctcctttggcatccatttttccaaagaagagtcgagtcctctgaggtctgtgcttgaaagccgtccgaaggcattcttgttagctttgcttttctccccatatcccaaggcgaagcgctgagattcttccatctaaaaaaccctcgacccgaaaccctcaccagataaactacagtttgtttaggaggccctgaccttcatggtgtctttgaagcccaaccactcggtttccttcggattttcctccctttgttcggggtttggtttggctcctctgtgtgtgtccgtatcttgttcggtgtcctcgaggttgagcttcactccactgcggcagaggcagcgtgcacactcggatttgctacgtttctatatatcttgaagctaaatgtatatatgagtagtttgccatgagataacacagtgtaaacagtagacacccagaaatcgtgacttctgtgttctctccatttgagtattttgtaatttttttgaaatatttgtggacataaataaaaccaagctacactacaaaaaaaaaaaaaaa

SEQ ID NO: 440 - DNA, 3366 bp, Homo sapiens
  ref <308>: DATABASE ACCESSION NUMBER: NCBI / NM_005550
  ref <309>: DATABASE ENTRY DATE: 2011-11-19
  ref <313>: RELEVANT RESIDUES IN SEQ ID NO: (1)..(3366)
gcccgagttaatcatttcctgtggaaagtgtgcgggaggggcgcgagcgggctggccgaggaggaggcggcggcgtggagctgcctcctgccggcgggccgggccgggccgagccccgggcgctgcggcgacgcctggatcctgcctccgccaggccggctgcctggtgccccgaggaggctgctgagccccaggccatggtcccctctcgcaggacgtggaacctgggagccacgccctcgctgcggggcctgtggagagtgggccgggccccggagcccgagccggggatggctcgccccgccccagccccagccagcccggccgcccgccctttcccacacaccggcccggggaggttgagaactgggcgtggaaaagataccccagtctgcggtgacgaggactccagtgcccgaagtgcagctcgcccagccctagctcagtgccgagcccttagcgtggactgggctggccccggaagcccccacgggctctacctgaccctgcaggtagaacacctgaaggagaagctcattagccaggcccaggaagtgagccgactgcgatctgagctggggggcaccgacttggagaagcaccgggacctgctgatggtggagaatgagcgactgaggcaggagatgcggcgctgtgaggccgagctgcaagagctgcgcacaaagccagcaggtccctgcccaggttgtgagcacagccaggagagcgcccagctccgtgacaagctgtcccagctgcagctggagatggcggaaagcaaaggcatgctgtcagagctgaacctagaggtgcagcagaagaccgaccggctggctgaggtggagctgcgactcaaggactgcctggctgagaaggcacaggaggaggagcggcttagtcggcgcctgcgtgacagccacgagaccattgccagcctgcgggcccagtccccacctgtcaagtatgtcatcaagacagtggaggtggagtcgtccaagaccaagcaggccctcagcgagtcccaggcccggaaccagcacctgcaggagcaggtggctatgcagaggcaggtgctgaaggagatggaacagcagctgcagagctcacaccagctgaccgcgcggctccgggcgcagattgccatgtacgagtcagagctggagcgggcccatgggcagatgctggaggagatgcagtccctggaagaggacaagaaccgggccattgaggaggcctttgccagagcccaggtggagatgaaggctgtgcacgagaatctagcaggcgtccggaccaacttgctgaccttgcagccggcactgcggaccctcaccaacgactacaatgggctcaagcggcaggtgcgcggcttcccactgctgctgcaggaggccctcaggagtgtcaaggccgagataggccaggccatcgaggaggtcaacagcaacaaccaggagctgctgcgcaagtaccgccgcgagctgcagctgcgtaagaagtgccacaatgagctcgtgcggctgaaagggaacatccgagtgattgctcgtgtccggccagtcaccaaagaggatggggaaggacctgaggccaccaatgctgtgactttcgatgccgacgacgactccatcatccacctgctgcacaagggcaagcctgtgtccttcgagctggacaaggtcttctccccacaggcctcgcagcaggacgtgttccaggaggtgcaggccctggtcacctcttgcattgatggcttcaatgtctgcatctttgcgtacggccagacgggcgccggcaagacgtacacgatggaggggaccgctgagaacccaggtatcaaccagcgggccctgcagctgctcttctccgaggtgcaggagaaggcgtctgactgggagtacaccatcaccgtcagcgctgcggagatctacaatgaggtcctcagggacctgctagggaaagagcctcaggaaaaactggagatccggctgtgcccagacggcagtgggcagctgtatgtaccagggctgactgagttccaagtgcagagcgtggacgacatcaacaaggtgtttgagtttggccacactaatcgcacgaccgagttcaccaacctgaacgagcacagctcccgctcgcacgcgctgctcatcgtgacggtgcgaggcgtggactgcagcacaggcctccgcaccacggggaagctgaacctggtggacttggctggctcggagcgcgtgggcaagtcgggggccgagggcagccgcctgcgggaggcgcagcacatcaacaagtcgctgtcggctctgggggacgtcattgctgccctgcgctcccgccagggccacgtgcccttccgcaactccaagctcacctacctgctgcaggattcgcttagtggtgacagcaagaccctcatggtggtacaggtgtcccccgtggagaagaacactagcgagacgctctattccctcaagtttgctgagagggtgcgctctgtggagctggggcctgggctacgcagggcagagcttgggtcctggtcaagccaggagcatctagagtgggagccggcttgtcagacgccacagccctcggcacgggcccactcagcccccagctctgggaccagtagccgccctggatccatccggaggaagctgcagccctcggggaagtcgcggccactgcctgtgtgacggatgtgaccccgctgggcctgaagctgggccctcactggcctgtccctgctgcagcgccaggacccccggaggtagaggcgagagtggaggctcttcttctgccccgtctcccctcaaagatgagaaacatgttcagaaggaaacggtgtctctcggctgtggctctgagtgcaaattgcatgggcggaaaggcgggggtggctgctcttcctggcaggcctgggccatcagcgaactgggccccgtgaggagggcgggagtgtggaggagggtgggcctctcacccaggctttctcggcccctctcctcagcttgcagagctggccagccccctccttagggggtgggcgaggagcctctgggcagacccaagaaccatggggactggggtgggttggtggcaccaatggcagccctccccgcccctctccttcaaggagggttcccgcagctggggggtgtgcggaggcgcatggcctcccgccacggggccgtgctgtgtttatggctggcagaggcagccagcgggtgggggattctgctgctcgctcacctgcctggctcgctggtctctcgaattttcttccctctgaaatcctatttaagaacttttggaagcttagccatttttacttattaaaataaaagaagcctttttacacaa

SEQ ID NO: 441 - DNA, 4107 bp, Homo sapiens
  ref <308>: DATABASE ACCESSION NUMBER: NCBI / NM_021960
  ref <309>: DATABASE ENTRY DATE: 2011-12-19
  ref <313>: RELEVANT RESIDUES IN SEQ ID NO: (1)..(4107)
gcgcaaccctccggaagctgccgcccctttccccttttatgggaatactttttttaaaaaaaaagagttcgctggcgccaccccgtaggactggccgccctaaaaccgtgataaaggagctgctcgccacttctcacttccgcttccttccagtaaggagtcggggtcttccccagttttctcagccaggcggcggcggcgactggcaatgtttggcctcaaaagaaacgcggtaatcggactcaacctctactgtgggggggccggcttgggggccggcagcggcggcgccacccgcccgggagggcgacttttggctacggagaaggaggcctcggcccggcgagagatagggggaggggaggccggcgcggtgattggcggaagcgccggcgcaagccccccgtccaccctcacgccagactcccggagggtcgcgcggccgccgcccattggcgccgaggtccccgacgtcaccgcgacccccgcgaggctgcttttcttcgcgcccacccgccgcgcggcgccgcttgaggagatggaagccccggccgctgacgccatcatgtcgcccgaagaggagctggacgggtacgagccggagcctctcgggaagcggccggctgtcctgccgctgctggagttggtcggggaatctggtaataacaccagtacggacgggtcactaccctcgacgccgccgccagcagaggaggaggaggacgagttgtaccggcagtcgctggagattatctctcggtaccttcgggagcaggccaccggcgccaaggacacaaagccaatgggcaggtctggggccaccagcaggaaggcgctggagaccttacgacgggttggggatggcgtgcagcgcaaccacgagacggccttccaaggcatgcttcggaaactggacatcaaaaacgaagacgatgtgaaatcgttgtctcgagtgatgatccatgttttcagcgacggcgtaacaaactggggcaggattgtgactctcatttcttttggtgcctttgtggctaaacacttgaagaccataaaccaagaaagctgcatcgaaccattagcagaaagtatcacagacgttctcgtaaggacaaaacgggactggctagttaaacaaagaggctgggatgggtttgtggagttcttccatgtagaggacctagaaggtggcatcaggaatgtgctgctggcttttgcaggtgttgctggagtaggagctggtttggcatatctaataagatagccttactgtaagtgcaatagttgacttttaaccaaccaccaccaccaccaaaaccagtttatgcagttggactccaagctgtaacttcctagagttgcaccctagcaacctagccagaaaagcaagtggcaagaggattatggctaacaagaataaatacatgggaagagtgctccccattgattgaagagtcactgtctgaaagaagcaaagttcagtttcagcaacaaacaaactttgtttgggaagctatggaggaggacttttagatttagtgaagatggtagggtggaaagacttaatttccttgttgagaacaggaaagtggccagtagccaggcaagtcatagaattgattacccgccgaattcattaatttactgtagtgttaagagaagcactaagaatgccagtgacctgtgtaaaagttacaagtaatagaactatgactgtaagcctcagtactgtacaagggaagcttttcctctctctaattagctttcccagtatacttcttagaaagtccaagtgttcaggacttttatacctgttatactttggcttggtttccatgattcttactttattagcctagtttatcaccaataatacttgacggaaggctcagtaattagttatgaatatggatatcctcaattcttaagacagcttgtaaatgtatttgtaaaaattgtatatatttttacagaaagtctatttctttgaaacgaaggaagtatcgaatttacattagtttttttcatacccttttgaactttgcaacttccgtaattaggaacctgtttcttacagcttttctatgctaaactttgttctgttcagttctagagtgtatacagaacgaattgatgtgtaactgtatgcagactggttgtagtggaacaaatctgataactatgcaggtttaaattttcttatctgattttggtaagtattccttagataggtttttctttgaaaacctgggattgagaggttgatgaatggaaattctttcacttcattatatgcaagttttcaataattaggtctaagtggagttttaaggttactgatgacttacaaataatgggctctgattgggcaatactcatttgagttccttccatttgacctaatttaactggtgaaatttaaagtgaattcatgggctcatctttaaagcttttactaaaagattttcagctgaatggaactcattagctgtgtgcatataaaaagatcacatcaggtggatggagagacatttgatcccttgtttgcttaataaattataaaatgatggcttggaaaagcaggctagtctaaccatggtgctattattaggcttgcttgttacacacacaggtctaagcctagtatgtcaataaagcaaatacttactgttttgtttctattaatgattcccaaaccttgttgcaagtttttgcattggcatctttggatttcagtcttgatgtttgttctatcagacttaaccttttatttcctgtccttccttgaaattgctgattgttctgctccctctacagatatttatatcaattcctacagctttcccctgccatccctgaactctttctagcccttttagattttggcactgtgaaacccctgctggaaacctgagtgaccctccctccccaccaagagtccacagacctttcatctttcacgaacttgatcctgttagcaggtggtaataccatgggtgctgtgacactaacagtcattgagaggtgggaggaagtcccttttccttggactggtatcttttcaactattgttttatcctgtctttgggggcaatgtgtcaaaagtcccctcaggaattttcagaggaaagaacattttatgaggctttctctaaagtttcctttgtataggagtatgctcacttaaatttacagaaagaggtgagctgtgttaaacctcagagtttaaaagctactgataaactgaagaaagtgtctatattggaactagggtcatttgaaagcttcagtctcggaacatgacctttagtctgtggactccatttaaaaataggtatgaataagatgactaagaatgtaatggggaagaactgccctgcctgcccatctcagagccataaggtcatctttgctagagctatttttacctatgtatttatcgttcttgatcataagccgcttatttatatcatgtatctctaaggacctaaaagcactttatgtagtttttaattaatcttaagatctggttacggtaactaaaaaagcctgtctgccaaatccagtggaaacaagtgcatagatgtgaattggtttttaggggccccacttcccaattcattaggtatgactgtggaaatacagacaaggatcttagttgatattttgggcttggggcagtgagggcttaggacaccccaagtggtttgggaaaggaggaggggagtggtgggtttatagggggaggaggaggcaggtggtctaagtgctgactggctacgtagttcgggcaaatcctccaaaagggaaagggaggatttgcttagaaggatggcgctcccagtgactactttttgacttctgtttgtcttacgcttctctcagggaaaaacatgcagtcctctagtgtttcatgtacattctgtggggggtgaacaccttggttctggttaaacagctgtacttttgatagctgtgccaggaagggttaggaccaactacaaattaatgttggttgtcaaatgtagtgtgtttccctaactttctgtttttcctgagaaaaaaaaataaatcttttattcaaatacagggaaaaaaaaaaaaaaaaaa

SEQ ID NO: 442 - DNA, 1664 bp, Homo sapiens
  ref <308>: DATABASE ACCESSION NUMBER: NCBI / NM_021959
  ref <309>: DATABASE ENTRY DATE: 2011-08-14
  ref <313>: RELEVANT RESIDUES IN SEQ ID NO: (1)..(1664)
gcatttggtgccgtggaagggaaaaagggggactgcagtatgcgtcacacccggaagcggcgagccggaagtggggttagccaggttatccccaggggtggagaagcggaggcccaggaggagggggaataaagaaggtggaggatcctggctaccactctgaatccgataccgcttctcttagacctcagcgacagaaaaagggaagggtgtctcatcccccttcctcctctcctccctgtcctgagccttagccatggccgaggcaggggctgggctgagcgagaccgtcactgagacaacggttaccgtgacaaccgagcccgagaaccggagccttaccatcaaacttcggaaacggaagccagagaaaaaggtagaatggacaagtgacactgtggacaatgaacacatgggccgccgctcatccaaatgctgctgtatttatgagaaacctcgggcctttggcgagagctccacggaaagtgatgaggaggaagaagagggctgtggtcatacacactgtgtacgtggccaccgcaaaggacggcgtcgtgcaaccctaggaccgacccccaccacccctccccagcctcctgacccttcccagccccctccagggccaatgcagcactaaatccctctctcctccagcattcctgtgtctgtctggccctaaatgtatccatgtggctacttctccagccccctccttccctctcttctgcctgatagagggaagaggaagaggaggacgaacagagatcctgaaattctgacttgctgctattccagaacccagcctcctgggtttccccagtcctcatttttcctcccaatacccacccttctctctcgagggatctaggcaccttggtcccagtgtcttccttttgttctcactgccaaactgcctgtcctgggatctagttatcttggccctgcactctcaacatgagtagcgaacacttaaattgggttttcaacagtcccagctttcactgccagggtcccagtcagattccaggaatttgcgccctaactttgcttgctaatcctggtttagagctatcccactaaaatatttaatcctaattcttagtccttgcctgtgagatatgaggtcttacaggagacctcagagctcccagcccttctcctcctgctaacccttctcacaccctcaagaggagttagaaaagaggtccttgtcattctcacctcttatggaaaatggaataagaaataatcatatcctttcttcccacccttctcctgttatttaggatttctgacaaagctggcttgagattggtcacttagagccgactgtctcctctgccttttgtttttcagcttcagagacagatccaatatagtcccagggacctgggtctctgggagaggaaggaagagggagggagcaaagagattggggtatgtcccctgtagtacactcttacctcttacttcctagactttgatttctccggcagcccagatgttcagttctcttggcccctctctaccccttactgggatccggttttcattttccggtccttttgccatacacagttacagagatcagtcaaatccataccaccactgagatctcatttattgccacagatgcacaaaataaataacccaaaatcacaaaa

SEQ ID NO: 443 - DNA, 6367 bp, Homo sapiens
  ref <308>: DATABASE ACCESSION NUMBER: NCBI / NM_014730
  ref <309>: DATABASE ENTRY DATE: 2011-12-18
  ref <313>: RELEVANT RESIDUES IN SEQ ID NO: (1)..(6367)
cccgtggctgagaagaaggaggcctgagagcgacatgtccccggcggctcaggcggagcggcccgtggcgctgtttttctgagtccggggtggcctggcagccggccgaggacgagggtcggcgggggctgcccccgtggtggtggccgccatgctgggagcctgggcggttgagggaaccgctgtggcgctcctgcgactgctgctgctgctgctgccgccggcgatccggggacccgggctcggcgtggccggcgtggccggcgcggcgggggccgggctgcccgagagcgtcatttgggcggtcaacgcgggtggagaggcgcatgtggacgtgcacgggatccacttccgcaaggaccctttggaaggccgggtgggccgagcctcagactatggcatgaaactgccaatcctgcgttccaaccctgaggaccagatcctgtatcaaactgagcggtacaatgaggagacctttggctacgaagtgcccatcaaagaggagggggactacgtgctggtcttgaaatttgcagaggtctactttgcacagtcccagcaaaaggtatttgatgtacgattgaatggccacgtcgtggtgaaggacttggatatctttgatcgtgttgggcatagcacagctcacgatgaaattatacctatgagcatcagaaaggggaagctgagtgtccagggggaggtgtccaccttcacagggaaactctacattgagtttgtcaaggggtactatgacaatcccaaggtctgtgcactctacatcatggctgggacagtggatgatgtaccaaagcttcagcctcatccgggattggagaagaaagaagaggaagaagaagaagaagaatatgatgaagggtctaatctcaaaaaacagaccaataagaaccgggtgcagtcaggcccccgcacacccaacccctatgcctcggacaacagcagcctcatgtttcccatcctggtggccttcggagtcttcattccaaccctcttctgcctctgccggttgtgagaacaaatgactatcctgaacagggtggaggggtgtgggaaagaaaccagccatattggttttggtttctgtatttttcacaatgattaatgaacaaaaacaaagagaaaaaaacacacatcaattaaaggagacaaaaagaggcagagcgagtagagagcagccctcattcaccacctggtcccagacgtgcttcagtcctcgtcctctctttgtggctggctcccagccttctctttcctcttgaggatacttagggtaaactggatccttcctgctcaaggatcctcatttgtatacctagtggaaaggactctgaactcagaggagtcactgttcctttttttaggttagaaattaacagcagggaaatgccatcttattacctgagacgaccagcactgggagttaggtacggtctgaagttatgtctagataagacttcagacgtcctgggattgaaagaatgtgtgtgaaggggtagaatttgtgcggtaaagacttaaaaaaaaaagtagggagattaaaaaaaaagaaagaaaatgcttccttatctggaagcctttctggattaatccagtgatggtcccacctttagtgtttgagctttgtcattgcttgtctccctggcatgtgccagttatagactgtccagcatccaagacgtttcggttatgtcgggtcctcagatcgcctctgacttgttaccacaacaaatcattttgatttcagtgcctgttggggacttgatttcttctcagttttgtttgtttgtttgtttccttaatctggctcatttgaaatttcttctccctctcaaccatcccactaagttatagccaagaagggaaggagacacggggatttggggttctctgcttgaatgtcttctcctttaccacctcaccttgttggtacctccctccctggatctctgagccagcagccaggaggacctgacccagcagttctttactggcccctttgtagggccttgctgccagggggcagggatgctttccagcctgcagcaacagaacacttgaccttaaaagtctcttctggtctttggattagaaaaggcttatgttagcatagcttaagagcaacctcagagacttgagccctactaagtgactgaccactgtttagagtgtctggtatctgatgttcatttattcccatgttcttgtgtgtcacagttcagccagttttggtttatgcctagagctacttcaaggaactagactaattagctatataggcccagcgatgcttcttattgatcttaatagtatgcccctccttcccctgtcctttcatttctctatccaagtagcagtcaggttcttggtgtgatgggactgaaagaattccagtcagccagagccttggcagctctgaagctaaccttagcatctaagtgtcgatcttgaattccctgaaaaaatttctataggaaatgaagcttccctggtcccctcctttctggccattgtcatccatttcccagttagggcaacaatgaaggaggacccagccaagctagaaggaattttgtggatgggagacagcaggattagcttcagcttgggctggagcagtcaatataggatctcaggccaggcccgcttttctagaatgtgtttaattttgagtttgctttattagatatgttttttaagagctctgtatatttgaactgctccttatgtgacaaaataggtagctcttgggctcatgtcctgggttttggctctttaatgattactccaggccagcatttagtcgtttgagaattgtagcctgttgttttcgctgtgacttgggtctcagtgctagggtattgagtcaggcagctggagggttgtggcccgaggctgcagtcagaggtatacttcccatagtgcttcacacagctcccctgcttctaaaggataaggtactgtagccttggtcctggggaccacctgcctggggcagtggacatcctaactaaacaggcttctggcagtagctttggttcctatcccatcgaaattccccaaagccctgggccactgccattgggttagtcaagatgaaggaggaggactggctgcctccattttgccttgtttgttagtttgcctgggtctgtctgaggaaggagggggtcccgccttccacctcaacacatcccttcagtgactcagagtctcagaaggaaaccctgactcctggggccatttcctaatggtactgtaagccaagcagctttgcttctgcctctgtttccaagcccacccttttcccctgagctcagggttagggatgggcgctttcctctctggttgtgaacgaaaggaaggaacatctttctatggctaacaaaaactaaaggggaagtgaggaaacaggaagaagtatggtgggggctggggtagactcccctggagccaagcctatccagctaacaagagctccctggggctggtcacagctggctcatgatgctgaacttgaaagtttttttgtttttgtttttgttttgtggctcctccaagatataggtacatgaagtttaggttaaaggggtgggattctttatttttatttttgtattgtatgtgtcaagaattactctgttgttcaccttttgctttttgcactgtttgttctcttatctgtattttgagcttagtgctaggactgagaggctgcaccatagggaatgtatgggagatggtgaggggtgccagtgaggggtgcgtggaggagaggcctgggctcctctactggatctacactctgtcccaggtttttagatcccactgagcccagctgactgaaaacaaggacagtcagggtgaaacttcttttgccagaagtgtggcctgagttgaatttctgggaggatgacgcagatgtctgctgcagagctgggctgagagttctgcagtctagctctgacttaggtcaggggcctgttggtctctcattggacgtttttgggtctcactcatgcttactgaaacattgtgccaagaaactctgtgggatttgtgtcccttaaaccagactcacttttctgaaaaatctccattgttgaggagaggctgctcaatcgacaccccgagttctcatgactgggaagatagttttcttcaggtgtcaatggcgttagactcccaggaagactagccctgcccacagggccacctgttggtttgagagcgtgttcgtgttctcttgccctccctgcctaagagctactgggatcacgttagcgggcatttaggctttgatgagagggcacagtttgagttaggtttacctccccctttctgtgcctgggaactgtttggtccagctttagaactgtggttttgacttccttatctcttgggagaagcttctgttttaaggaatttctcttccttcttctcctgcctctagcctctcctggaaaggcctggatatggtttctaaaatctcagctgagaacttcagaaaacagcagcagtattttccttttcctagtgctaaaatccctttccctagaaattggctcaccttgggaaacccagggaaagaatcagcaggttctctgccctccctaggggttggggaaggacccaccccggtcagcacagtgccttttcctctcctgctctgagccagggtggggcattccctctagattcaggtttgggcaggggtcctatagtccctgccatggggctgcttccctgtcccttccctcccctttgctggcctactctggcataattcaagtgtcttcttgccttggggatccttagtggcatcaaatggcaacatggaatattgtcctccatgcccctccagaaggacctaggagagtaggtgagctttccaaagtgagagacgaatctttctttctttttttttttaaagggcaggatgggtatgctttgggctttctccttctgtggccccggaggaaggagagactgaggcaaggcaaagtgatagtacactgaagcagaaccggaaacacccaggaactgttcagaaatctcagaagaaatctgcttctcttcgatggaaagatataattaacgatcaaagagctctaagaaaattgcaaagaagccttaatgttcaagctttagaaagatcagagcaatttttctctttcagtccaaactaagactctctgtatttaaatctctctggggcaagagggctagatttcctcattttgttatgagactagattggtaccagtagatcagctgcctagcgagggcaggtttcttctttgcatctgtgtggcttgcttccagtctggcctgtcctttccagctgccttttgtctagcctgctatggggggccagattatcttgataagagcaggtgatttggggactagctgggttggcaggaaaagagcaggatggatctcttgggacaggttcccccaggagtataaacacaaggagccaggattgtgctggcagccaaggaaacagtagtgcctgtttgagttggcagagagggccttggcacctcttgcatccaggcagtcttgtgagatgggggcacatagcactggggaaagcagaactccattctcacctctattttgagcttcagtgctttatttcagtatgaggaaaaacaacaacaaactgaagtgcgctttccgtcctttcaaaggacaactgtcgggaagggagagccgagttgcgaggtaggaggggagcactggcagggagagacattcttgactcctctcttccctggtgtgttgtgatccagggaatgaaaagaaatttgaccctggattggttctctccttggacttaaggaatcttaccttttccttccacaaagttctcccaggcaaggaccagctgcccattctgagcccagggcagcctcttcaaccattattggtctaacctggcttgtcaggaaaccaagcccacccttccacattgggcctggctgctctattctgtaccaagtactggagaaaaagcatcaagttcttagcccttgtagcttctaccctagtttcccatcctctctctgtggaggccaaaccaactctttgccagcagccacaacatgcattgacagcggcacagtgagatataactgatgggctttgaacctggttggccggggaagctgtaggggtggatagagctggctttccttctgggctgtctccatctgaccctaccccttccatgtcccaccccactcccaccaaaaagtacaaaatcaggatgtttttcactgtccattgctttgtgttttaataaacaatttgcagtgacactctgaaaaaaaaaaaaaaaaaa

SEQ ID NO: 444 - DNA, 1585 bp, Homo sapiens
  ref <308>: DATABASE ACCESSION NUMBER: NCBI / NM_014402
  ref <309>: DATABASE ENTRY DATE: 2011-11-21
  ref <313>: RELEVANT RESIDUES IN SEQ ID NO: (1)..(1585)
cttgccggaaatgacgaacgagtcaaccggatcggtgactgtggagggcgagctgagccctggccgccgccacaatgggccgcgagtttgggaatctgacgcggatgcggcatgtgatcagctacagcttgtcaccgttcgagcagcgcgcctatccgcacgtcttcactaaaggaatccccaatgttctgcgccgcattcgggagtctttctttcgcgtggtgccgcagtttgtagtgttttatcttatctacacatgggggactgaagagttcgagagatccaagaggaagaatccagctgcctatgaaaatgacaaatgagcaacgcatccggatgacggttccctgtctctgaaagacctttctctggaagaggagtctgcattgtagtgtctcaaagacacaataaacttcctatggtctgcactgttgtgatattacatttttgtgagtagaatcctgtgtgaccactaatattcaagttcatgaagcgcccctcctcagcatgagtcttgaagttttgcctggtctcgggttttggtgaaagagcagggctccccctttgttccattatctacaagaaagtagctgcaggtactcctgcatctaaccatttgtgggtgacatgggctatggcgagtgctggttcttggccctctgctcccatagcaacaataaagtctactaactatattgtaattagtatgtgtcagggacgcttttattttttattttttgagatggagtcttgctctctcacccaggctggagtgcagtggtgtgatctcggctcactgccatctgtgcctcctgggttcaaacgattctcctgtctcagcctccgagtagctgggattacaggtgcaggacaccacacctggctaattttttgtatttttagtagagacaggtttcaccatgttggccaggctggtctggaactcctgacctcagatgatctgtgcgcctcagcctcccaaagtgctgggattacaggcgtaagccatggtgctctgggcctcaaatactcttcttagctacacaaatgaactgttaaacctcacaagcacctttaacgtatcctcatttggcagatgaggaaatgggcacagagagattaagtaatttgccagaaattatacagcagtgaatggtggagtcttgcactaaagtgatgctcttaaaactatgctctattgcaggggtgtccaatcttttagcttccctgggccacacataaaatacgctaacattacaatagctgataagctttaaaaaatggcaaaaaaaaccctcagcgttttagaaagtttacaaatttttgttgggtcggattcaaagccatcctgggctgcttgctgcccaggactgcggttggacaagcttgctctactgcctttcctcctaaggcaggccttagcctgaggggatatcagctataaaacggatgaggtgatctcttagcctccacagcagttttctgtttctgtgccaggaggccaacaatgttttcaaccatatgtggttcataaagcctcaaagatttactctggccctttatgaataaagtttacccctgatct

SEQ ID NO: 445 - DNA, 3664 bp, Homo sapiens
  ref <308>: DATABASE ACCESSION NUMBER: NCBI / NM_007067
  ref <309>: DATABASE ENTRY DATE: 2011-12-25
  ref <313>: RELEVANT RESIDUES IN SEQ ID NO: (1)..(3664)
gtcaggtgacgcgagacccagccggaagtgaaggaaaaagcgcttcagcccgcggcgcctgcgcagaacgctccagacgctgagaggcaggaggcactagggatcgtccgcaggattgggactgatacagaggccgccacggagcccgccggagccaccgttcctgctgctgccgccgctgcccgaatcggaaccgtcgggccgcagccgccggcaatgccgcgaaggaagaggaatgcaggcagtagttcagatggaaccgaagattccgatttttctacagatctcgagcacacagacagttcagaaagtgatggcacatcccgacgatctgctcgagtcacccgctcctcagccaggctaagccagagttctcaagattccagtcctgttcgaaatctgcagtcttttggcactgaggagcctgcttactctaccagaagagtgacccgtagtcagcagcagcctaccccagtgacaccgaaaaaataccctcttcggcagactcgttcatctggttcagaaactgagcaagtggttgatttttcagatagagaaactaaaaatacagctgatcatgatgagtcaccgcctcgaactccaactggaaatgcgccttcttctgagtctgacatagacatctccagccccaatgtatctcacgatgagagcattgccaaggacatgtccctgaaggactcaggcagtgatctctctcatcgccccaagcgccgtcgcttccatgaaagctacaacttcaatatgaagtgtcctacaccaggctgtaactctctaggacaccttacaggaaaacatgagagacatttctccatctcaggatgcccactgtatcataacctctcagctgacgaatgcaaggtgagagcacagagccgggataagcagatagaagaaaggatgctgtctcacaggcaagatgacaacaacaggcatgcaaccaggcaccaggcaccaacggagaggcagcttcgatataaggaaaaagtggctgaactcaggaagaaaagaaattctggactgagcaaagaacagaaagagaaatatatggaacacagacagacctatgggaacacacgggaacctcttttagaaaacctgacaagcgagtatgacttggatcttttccgaagagcacaagcccgggcttcagaggatttggagaagttaaggctgcaaggccaaatcacagagggaagcaacatgattaaaacaattgcttttggccgctatgagcttgatacctggtatcattctccatatcctgaagaatatgcacggctgggacgtctctatatgtgtgaattctgtttaaaatatatgaagagccaaacgatactccgccggcacatggccaaatgtgtgtggaaacacccacctggtgatgagatatatcgcaaaggttcaatctctgtgtttgaagtggatggcaagaaaaacaagatctactgccaaaacctgtgcctgttggccaaactttttctggaccacaagacattatattatgatgtggagcccttcctgttctatgttatgacagaggcggacaacactggctgtcacctgattggatatttttctaaggaaaagaattcattcctcaactacaacgtctcctgtatccttactatgcctcagtacatgagacagggctatggcaagatgcttattgatttcagttatttgctttccaaagtcgaagaaaaagttggctccccagaacgtccactctcagatctggggcttataagctatcgcagttactggaaagaagtacttctccgctacctgcataattttcaaggcaaagagatttctatcaaagaaatcagtcaggagacggctgtgaatcctgtggacattgtcagcactctgcaagcccttcagatgctcaaatactggaagggaaaacacctagttttaaagagacaggacctgattgatgagtggatagccaaagaggccaaaaggtccaactccaataaaaccatggatcccagctgcttaaaatggacccctcccaagggcacttaaagtgacctgtcattccgagccagcgaaccccagcagtaggaatccgtaccctagggatctgtctgtcatttctctgttgctcttgtgattggcaagtacagtatcctttgggaaggccatccccctcaggactgtcctggctccgacctttgtgtacactgcagacgctggttctgaggaactgttgtttcggcctcagtgaggttgcctggatgggatctgtattagacttgagtgcaggtctctcagcactgacccaaggagttctgttatggtactgtacctgtccagtcactggttctctcctcatgtcctctcgccccatgaggttgtgttgtgtcttctaagcgtggtactagtgcttgccacctggtcaccagacctccaaatatggctgccaccaccaggacctttccagttactccttatatgtgtgttctatggaggggcagggaaaaggtggcacttgtgagtgtgtgtggattggcagggggtccattcactttgggttccatcttgctttaaatttcttcattttgattaagagacctctttttgatctgtattgggctaaccagagccaaatacttttgaagagtttcccagggactagtcatggtaatagcatataattgatctgaatgagatggagagaagaatgaaggggtggtggttctgggtttgatttgagttcacctgtgggcagtgggcagtgggcagtgtcttggtgaaagggaacggatactactttttgcctcaccgtaaagtactcactagtaaatatttccttctctctttactcccactttttacgtttgcaggtgccaaagtaatgtccacttttccctttcatgctgcatattaactggttaattatactgcagaaaccttttcacctccactagtctgatacagtacatctgtacttccatataccttgcactgattttgtctgagtgccctgggagaagtagaaaatgattgaaagtgacttccgtatctcagcccatgactcagcaaggcagaatggccacccctgccaaagtttgcttctcttttcaacagtgcctcaccctccctctaggattaaagtgcttctgcccttccacgaactcctcctccatttcctttttgggatttgtcaccatccttctattctctggtcttctatttttggtgttgttcaagtgaaggaagagatgttccctctaatttctctctagcccattataacctgctatcttggggcaacttttgatgtatgacatgtcacccttcccaacttggtctcctccaacatgctgtcttcatgtggagccctcaccacaatccctgactccggtcatttgtgcctttctcttgtcatctctgtacactacttatattcactgtgggttgggggagctaattttaagcatgttcagtggcagctcccctccagtttcagtgtcactgttaaaatttatcaaaaagcaacttcactaggggttttcttaagggataaaggccttttacagaagctaaacccttccccacatgtggtagaatgtgctcttctatatctactcctcaataaagcatgttctctgctcaaaaaaaaaaaaaaaaaaaa

SEQ ID NO: 446 - DNA, 1794 bp, Homo sapiens
  ref <308>: DATABASE ACCESSION NUMBER: NCBI / NM_006086
  ref <309>: DATABASE ENTRY DATE: 2012-01-01
  ref <313>: RELEVANT RESIDUES IN SEQ ID NO: (1)..(1794)
gacatcagccgatgcgaagggcggggccgcggctataagagcgcgcggccgcggtccccgaccctcagcagccagcccggcccgcccgcgcccgtccgcagccgcccgccagacgcgcccagtatgagggagatcgtgcacatccaggccggccagtgcggcaaccagatcggggccaagttctgggaagtcatcagtgatgagcatggcatcgaccccagcggcaactacgtgggcgactcggacttgcagctggagcggatcagcgtctactacaacgaggcctcttctcacaagtacgtgcctcgagccattctggtggacctggaacccggaaccatggacagtgtccgctcaggggcctttggacatctcttcaggcctgacaatttcatctttggtcagagtggggccggcaacaactgggccaagggtcactacacggagggggcggagctggtggattcggtcctggatgtggtgcggaaggagtgtgaaaactgcgactgcctgcagggcttccagctgacccactcgctggggggcggcacgggctccggcatgggcacgttgctcatcagcaaggtgcgtgaggagtatcccgaccgcatcatgaacaccttcagcgtcgtgccctcacccaaggtgtcagacacggtggtggagccctacaacgccacgctgtccatccaccagctggtggagaacacggatgagacctactgcatcgacaacgaggcgctctacgacatctgcttccgcaccctcaagctggccacgcccacctacggggacctcaaccacctggtatcggccaccatgagcggagtcaccacctccttgcgcttcccgggccagctcaacgctgacctgcgcaagctggccgtcaacatggtgcccttcccgcgcctgcacttcttcatgcccggcttcgcccccctcacagcccggggcagccagcagtaccgggccctgaccgtgcccgagctcacccagcagatgttcgatgccaagaacatgatggccgcctgcgacccgcgccacggccgctacctgacggtggccaccgtgttccggggccgcatgtccatgaaggaggtggacgagcagatgctggccatccagagcaagaacagcagctacttcgtggagtggatccccaacaacgtgaaggtggccgtgtgtgacatcccgccccgcggcctcaagatgtcctccaccttcatcgggaacagcacggccatccaggagctgttcaagcgcatctccgagcagttcacggccatgttccggcgcaaggccttcctgcactggtacacgggcgagggcatggacgagatggagttcaccgaggccgagagcaacatgaacgacctggtgtccgagtaccagcagtaccaggacgccacggccgaggaagagggcgagatgtacgaagacgacgaggaggagtcggaggcccagggccccaagtgaagctgctcgcagctggagtgagaggcaggtggcggccggggccgaagccagcagtgtctaaacccccggagccatcttgctgccgacaccctgctttcccctcgccctagggctcccttgccgccctcctgcagtatttatggcctcgtcctccccacctaggccacgtgtgagctgctcctgtctctgtcttattgcagctccaggcctgacgttttacggttttgttttttactggtttgtgtttatattttcggggatacttaataaatctattgctgtcagatacccttaaaaaaaaaaaaaaaaaaaaaaaaa

SEQ ID NO: 447 - DNA, 2286 bp, Homo sapiens
  ref <308>: DATABASE ACCESSION NUMBER: NCBI / NM_014972
  ref <309>: DATABASE ENTRY DATE: 2011-08-14
  ref <313>: RELEVANT RESIDUES IN SEQ ID NO: (1)..(2286)
cgaagagtgcgcaggcgcgccgacagccgagttttctgcgcttccttctccctctctccagacgtcgtggtcgttcggtcctatgtcgcgccgggccctccggaggctgaggggggaacagcgcggccaggagcccctcgggcccggcgccttgcatttcgatctccgtgatgacgatgacgcggaagaagaagggcccaagcgggagcttggtgtccggcgtcccgggggcgcagggaaggagggcgtccgagtcaacaaccgcttcgagctgataaacattgacgatcttgaggatgaccctgtggtgaacggggagaggtctggctgtgcgctcacagacgctgtggcaccagggaacaaaggaaggggtcagcgtggaaacacagagagcaagacggatggagatgacaccgagacagtgccctcagagcagtctcatgcaagtggcaaactccggaagaagaaaaaaaaacagaaaaacaagaaaagcagcacgggagaagcatcggaaaacggactagaagatatcgatcgcatcctagagaggattgaggacagcactgggttgaaccgtcccggcccagctcccctgagctccaggaagcacgttctctacgtggagcacagacacttgaatccagacacagaactgaaaaggtattttggtgcccgggcaatcctgggggagcaaaggccacggcagagacaacgtgtgtaccccaagtgcacatggctgaccacccctaaaagcacctggccccgctacagcaaaccaggtctgtccatgcggctgctggaatcaaaaaaaggcctctccttctttgcgtttgagcacagtgaggagtaccagcaggctcagcacaagttcctggtggccgtggagtctatggagccgaacaacatcgtggttctgctccagacgagcccttaccacgttgactcactcctgcagctcagcgatgcctgccgctttcaagaggatcaggagatggctcgagacctcgtagagagagcgctgtacagcatggaatgtgcgttccaccccctgttcagtctcaccagtggggcctgccggctggattaccgcagacccgagaacaggagcttctacctggccctctacaagcagatgagcttcctggagaagcgaggctgcccgcgcacggcgctggagtactgcaagctcatcctgagtctcgagccggatgaggaccccctctgcatgctgctgctcatcgaccacctggccttgcgggcccggaactacgagtacctgatccgcctcttccaggagtgggaggctcatcggaacctgtcccagctccctaattttgccttctctgttccactggcgtatttcctgctgagccagcagacagacctccctgagtgtgagcagagctctgccaggcagaaggcctctctcctgatacagcaggcgctcaccatgttccctggagtcctcctgcccctgctcgagtcttgcagtgtgcggcccgacgccagcgtttccagtcaccgcttctttggacccaatgctgaaataagccagccccctgccctgagccagctggtgaacctgtaccttgggaggtcacactttctctggaaagagcccgccaccatgagctggctggaggagaacgtccacgaggttctgcaagcagtggacgccggggacccagccgtggaagcctgtgagaaccggcggaaggtgctctaccagcgtgcacccaggaatatccaccgccatgtgatcctctctgagatcaaggaagccgtcgctgccctgcccccggacgtgaccacgcagtctgtgatggggtttgatcctctgcctccttcggacacaatctactcctacgtcaggccagagaggctaagtcctatcagccatggaaacaccattgctctcttcttccggtcactgttgccaaactataccatggagggggagaggcccgaggaaggagtggctgggggtctgaaccgcaaccagggcctgaacaggctgatgctggctgtgcgcgacatgatggccaacttccacctcaacgacctggaggcgccgcacgaggacgacgctgagggggagggggagtgggactgagcgtccgcagaggtgaccgaaaagccgtatgatgatgttcccgatttctctgttggtcggagtcggccagttgcctgaagtagggaagctgagtgtgtcgctccctggtccactgtttctcctataaatgtaaatgggtcacgctcaaaaaaaaaaaaaaaaaaaaaaaaaaa

SEQ ID NO: 448 - DNA, 2412 bp, Homo sapiens
  ref <308>: DATABASE ACCESSION NUMBER: NCBI / NM_024092
  ref <309>: DATABASE ENTRY DATE: 2011-12-18
  ref <313>: RELEVANT RESIDUES IN SEQ ID NO: (1)..(2412)
aatgccgagtggtggcaagaggaggattagcttccactccgatttcaaagatccagtttacccactctacagcccagatatagtcacttatttcccctttccagccagagacttccgttccctgctggaacttccgatcccattcttctctcggtgggaatgcttgtggggggaaaaagaaacgcaatagataaagcggggcgcatgcgctcccggcacaggcttcgattgtgaggaaggccggctagtctccgagctcatcccgccttgcgcatgcggagaaggtaaaccagcgccccgagttgaggcgcgggtttggtggcgcgtttcagcgaagtcgcacgtgaaggatagcagtggcctgagaaagacccagtcatggcagcctccagcatcagttcaccatggggaaagcatgtgttcaaagccattctgatggtcctagtggcccttatcctcctccactcagcattggcccagtcccgtcgagactttgcaccaccaggccaacagaagagagaagccccagttgatgtcttgacccagataggtcgatctgtgcgagggacactggatgcctggattgggccagagaccatgcacctggtgtcagagtcttcgtcccaagtgttgtgggccatctcatcagccatttctgtggccttctttgctctgtctgggatcgccgcacagctgctgaatgccttgggactagctggtgattacctcgcccagggcctgaagctcagccctggccaggtccagaccttcctgctgtggggagcaggggccctggtcgtctactggctgctgtctctgctcctcggcttggtcttggccttgctggggcggatcctgtggggcctgaagcttgtcatcttcctggccggcttcgtggccctgatgaggtcggtgcctgacccttccacccgggccctgctactcctggccttgctgatcctctacgccctgctgagccggctcactggctcccgagcctctggggcccaactcgaggccaaggtgcgagggctggaacgccaggtggaggagctgcgctggcgccagaggcgagcggccaagggggcccgcagtgtggaggaggagtgagccggatgccccacacaccgccagtgtcataccaaagagctgagctgcttcggggccatgcagccctcctgccagccccctgcccttttcttgccctgtctctgaaccttcagaacattgatccttgccgcagccccactagccaagagaaacagagaaagaccattccccctgcctgtccttgcggccctgtcttctgaggttctctgtctggggttggctctcttaaccctttctctgctcccagcctgcctcaccagggaaggttggaggggcctccctctggcttctgcatctgcgccagcaaacatcactgccgttggtctctcatgacttaactggcttccctctgctgctgccttggcttcctcctaatgctcgtgctctcctgtccttctgaagttgctccttggccaaatctccagctcccttcttgttttcctcatcctcctaccctgtactcccaccaaaccatggtcctttaaggcacgctcctgtcctcctcattgcccagcagtagggaggggcaggggtaaggggacctgaggataaagggtggggaaacagggtcccctgaggcctgtgggggctgcaggggaggaggatgtaccttgtgtctctttcaagtgccttaatccgagccagcagggccttctgcttgcctgctgccatactgtatgtaggaaagtgttctgtggctgctttgtgtcaagaaaagagcagtcactctcagaatcttgattccccatcagccaaagcaaaagatggctgctgctttgtaggcatgtgcctgcaagtgggaccttgctgggcattatatgccctgtgggggtttcagagaccctgaaagaggagggaggacccgcctccttgtctgcacaactgcatgcacttctctccccatcgctccacaacctgaaaccgagaaggagttgctgaccagtgcccaccccggcagcccgggaggaacacaggcagctcctttcccttcacgtggtctgcagagagcagggtgagctgccagctgcccctctccaccagggtaccctgtcttggtggttaggggccacttttcctttgaggctctagtggaggtggatgtccttctctgccaggcttggcacatgatgtgaagaataaatgcccaattcttactgttcaggtttgatgtggaatcacagctgcagtgatatatattttttatcagtgcttggttggttttaaataaagtgcacgctattttattatcttgttctgaataaaatgtatttactccaaaaaaaaaaaaaaaaaaaaaaaaaa

SEQ ID NO: 449 - DNA, 1193 bp, Homo sapiens
  ref <308>: DATABASE ACCESSION NUMBER: NCBI / NM_021983
  ref <309>: DATABASE ENTRY DATE: 2011-11-12
  ref <313>: RELEVANT RESIDUES IN SEQ ID NO: (1)..(1193)
ggggggccatagttctccctgattgagacttgcctgctgctgtgaccactggtcttgtcctcttctccagcatggtgtgtctgaagctccctggaggctcctgtatggcagcgctgacagtgacattgacggtgctgagctccccactggctttggctggggacacccaaccacgtttcttggagcaggctaagtgtgagtgtcatttcctcaatgggacggagcgagtgtggaacctgatcagatacatctataaccaagaggagtacgcgcgctacaacagtgacctgggggagtaccaggcggtgacggagctggggcggcctgacgctgagtactggaacagccagaaggacctcctggagcggaggcgggccgaggtggacacctactgcagatacaactacggggttgtggagagcttcacagtgcagcggcgagtccaacctaaggtgactgtgtatccttcaaagacccagcccctgcagcaccacaacctcctggtctgctctgtgaatggtttctatccaggcagcattgaagtcaggtggttccggaacggccaggaagagaaggctggggtggtgtccacaggcctgatccagaatggagactggaccttccagaccctggtgatgctggaaacagttcctcggagtggagaggtttacacctgccaagtggagcatccaagcatgatgagccctctcacggtgcaatggagtgcacggtctgaatctgcacagagcaagatgctgagtggagtcgggggctttgtgctgggcctgctcttccttgggacagggctgttcatctacttcaggaatcagaaaggacactctggacttcagccaacaggactcttgagctgaagtgcagatgaccacattcaaggaagaaccttctgccccagctttgcaagatgaaaagctttcccacttggctcttattcttccacaagagctttgtcaggaccaggttgttactggttcagcaactctgcagaaaatgtcctcccttgtggcttccttagctcctgttcttggcctgaagcctcacagctttgatggcagtgcctcatcttcaacttttgtgcttccctttacctaaactgtcctgcctcccgtgcatctgtactccccttgtgccacacattgcattattaaatgtttctcaaacatggagttaaaaaa

SEQ ID NO: 450 - DNA, 2969 bp, Homo sapiens
  ref <308>: DATABASE ACCESSION NUMBER: NCBI / NM_006510
  ref <309>: DATABASE ENTRY DATE: 2011-11-21
  ref <313>: RELEVANT RESIDUES IN SEQ ID NO: (1)..(2969)
gggtttacgctgccgccggcatccgctcggacgcggccacgttgtcttgcgcgctttgcccgcctggccctgggactctgaccctcggctaccctttcctgccccactagcgtggccgcgagcctcggtgagccggccgtattcccgctctcgcttagggggcacaggcgcaggcatcggcccggccactccaagccttcggtgcgcgggcgcgtctgggatacgggcccgggaggcgccgccctccgtccgcccggtgcctctcaggaacagcgaaccggagagagcgccggagagttgggctcagtgcagagctcggcgccggggcccatgcccgtgcgcccccgcaggccggcgccatggcctccgggagtgtggccgagtgcctgcagcaggagaccacctgccccgtgtgcctgcagtacttcgcagagcccatgatgctcgactgcggccataacatctgttgcgcgtgcctcgcccgctgctggggcacggcagagactaacgtgtcgtgcccgcagtgccgggagaccttcccgcagaggcacatgcggcccaaccggcacctggccaacgtgacccaactggtaaagcagctgcgcaccgagcggccgtcggggcccggcggcgagatgggcgtgtgcgagaagcaccgcgagcccctgaagctgtactgcgaggaggaccagatgcccatctgcgtggtgtgcgaccgctcccgcgagcaccgcggccacagcgtgctgccgctcgaggaggcggtggagggcttcaaggagcaaatccagaaccagctcgaccatttaaaaagagtgaaagatttaaagaagagacgtcgggcccagggggaacaggcacgagctgaactcttgagcctaacccagatggagagggagaagattgtttgggagtttgagcagctgtatcactccttaaaggagcatgagtatcgcctcctggcccgccttgaggagctagacttggccatctacaatagcatcaatggtgccatcacccagttctcttgcaacatctcccacctcagcagcctgatcgctcagctagaagagaagcagcagcagcccaccagggagctcctgcaggacattggggacacattgagcagggctgaaagaatcaggattcctgaaccttggatcacacctccagatttgcaagagaaaatccacatttttgcccaaaaatgtctattcttgacggagagtctaaagcagttcacagaaaaaatgcagtcagatatggagaaaatccaagaattaagagaggctcagttatactcagtggacgtgactctggacccagacacggcctaccccagcctgatcctctctgataatctgcggcaagtgcggtacagttacctccaacaggacctgcctgacaaccccgagaggttcaatctgtttccctgtgtcttgggctctccatgcttcatcgccgggagacattattgggaggtagaggtgggagataaagccaagtggaccataggtgtctgtgaagactcagtgtgcagaaaaggtggagtaacctcagccccccagaatggattctgggcagtgtctttgtggtatgggaaagaatattgggctcttacctccccaatgactgccctacccctgcggaccccgctccagcgggtggggattttcttggactatgatgctggtgaggtctccttctacaacgtgacagagaggtgtcacaccttcactttctctcatgctaccttttgtgggcctgtccggccctacttcagtctgagttactcgggagggaaaagtgcagctcctctgatcatctgccccatgagtgggatagatgggttttctggccatgttgggaatcatggtcattccatggagacctccccttgaggaggtgaattcaggccaaaagggctgttggctgtaatcctacgccaggcacaaggcatcttgttgccttgccacgtcctgtcacagctgggtatccttaccatgttccacgcccttgcagtgggagacaggatgtccatgttctctaccatccttttccttcccatgcagattgtgaaatgtaatgagatgtatcaagatatcctagaaataaaaaccagatgtccacctccagtgtttcatactttctggttttacacatcgctggagggataaagagtatggataatctttggatttggagagccgttcaagatacttccagcttcttggctcagcctggcttcctctggttcagccccacataatgattatggctatttgctgtcatttctgggctagggctcctttctaacaacctagactggaataaggccctgtcagcatggctccctttatcccagttttccgtctgggaacagtacctctgcccctgattcccaatgtgccatagttttattaactccattaaagaagcctgtatgtgttttggttagttacagttattttacaataatggtgggtaatggccccacctctgttatgagataatgttctaatcaatgtctctgcctttgtatcttttctgagggctttgtctgttctcttcattctaatgaaaggtgtattctagtgctgggtgcatatcatccaggataatattctgcccaactccatcctctgttactagatcccttaccagtcacatttgtggactggtggccagtcgtataccatccctggaaggattctgggacaatattccagggattcattgacttcttggctccttttctccatttcctttgggggaagggggaattgaccatgcttaagtgcatcctatcaaggggcagctccgtccccatggccattggatcatgagacactctgaagtcagaaggctggggcagatcacttcaagcaagcccccatgatggttctcagtcctgcttctctgtgggtacgtgcccctctgtttaaaaataaactgaatatggatgttta

SEQ ID NO: 451 - DNA, 2095 bp, Homo sapiens
  ref <308>: DATABASE ACCESSION NUMBER: NCBI / NM_006711
  ref <309>: DATABASE ENTRY DATE: 2011-11-28
  ref <313>: RELEVANT RESIDUES IN SEQ ID NO: (1)..(2095)
gtcggggccgctgcggacggaagggcgcctgtgcttcgtccgctcggcggtggcccagccaggcccgcgggactcagaccagcggggagcgcggcctccgcccttggggccctcccgccgggccggagacccaagcccccaacgccaggccctgccctggaagcgctcgcggcccggcgcctggacgggggagttgctgctctttggcgtaaattgcaatcgattagggatcgtttctcagaatcaagttagaagtgagagttcagataagtgaggccgccattgctgctttgaacacctcagaaggggagaatggatttatcaggagtgaaaaagaagagcttgctaggagtcaaagaaaataataaaaagtccagcactagggctccttcacctaccaaacgcaaagaccgctcagatgagaagtccaaggatcgctcaaaagataaaggggccaccaaggagtcgagtgagaaggatcgcggccgggacaaaacccgaaagaggcgcagcgcttccagtggtagcagcagtaccaggtctcggtccagctcgacttccagctcaggctccagcaccagcactggctcaagcagtggctccagctcttcctcagcatccagccgctcaggaagctccagcacctcccgcagctccagctctagcagctcttctggctctccaagtccttctcggcgcagacacgacaacaggaggcgctcccgctccaaatccaaaccacctaaaagagatgaaaaggagaggaaaaggcggagcccatctcctaagcccaccaaagtgcacattgggagactcacccggaatgtgacaaaggatcacatcatggagatattttccacctatgggaaaattaaaatgattgacatgcccgtggaaaggatgcatccccatctgtccaaaggctatgcgtacgtagagtttgagaatccagatgaagccgagaaggcgctgaagcacatggatggaggacaaattgatggccaggagatcactgccaccgccgtgctggccccctggcctaggccaccccccaggagattcagccctcccaggagaatgttgccaccaccgcctatgtggcgcaggtctcccccacggatgaggagaaggtcccgctccccgaggcgcaggtcccccgtgcgccggagatcacggtccccgggccgccgccgccacaggagccgctccagctccaactcctcccgataaacaggccactgaagctctcgcccctgtaacttataccccacccagctcagttttgtcacttttctagccaaaggaagaccagtaggaaagcaaacccttgactctggcaggatttgcaggcagcaggcagcacccctctgccagccgggccccggctgcagaagtgctgttggtttggatgctgtgtgcctgtcaagattccctccggttttctggctagaaagctcatccgtttccggtttctaagagtcagttcagtggcagagccaccagggaaaagtgaggctcttgggggtggtttgaccctgcttacctgggagcacacttttcccttccccgatgacctgggatggtggccaggccgtgcccttgctgttgctgggcagtgtccttttggaaagggagctgccccaggctttagtgcagctgccaaccctgttaggcctggcctctcgaggcctcttctgacctcaagggtcacaccccctcaaagatcctctcacccatggtagttgctgctcgtggttctgtctgtccgtgcaccgatgcacacaccgcaccccaccactgtactctgaaattggcgagtgagtggagagccagctctgcggagtcatcacgcagccatggttgtgcctgccgttcatggtggtctttcaggttatcttggcaacatgtacattgcttttattttttttcttttttgctttcattgtacagtcagtactataaaatttctcttttgagttttatacctttgtagcattttagatgacattgtgtttgtactttgttgtgtagagtggaagaattgtgttgaataaacccaagatcggaatgcaaatctagttctgggttcactgcc

SEQ ID NO: 452 - DNA, 2233 bp, Homo sapiens
  ref <308>: DATABASE ACCESSION NUMBER: NCBI / NM_006145
  ref <309>: DATABASE ENTRY DATE: 2011-11-13
  ref <313>: RELEVANT RESIDUES IN SEQ ID NO: (1)..(2233)
gggacggcgacagcgggtcggcgggccgcaggagggggtcatgggtaaagactactaccagacgttgggcctggcccgcggcgcgtcggacgaggagatcaagcgggcctaccgccgccaggcgctgcgctaccacccggacaagaacaaggagcccggcgccgaggagaagttcaaggagatcgctgaggcctacgacgtgctcagcgacccgcgcaagcgcgagatcttcgaccgctacggggaggaaggcctaaaggggagtggccccagtggcggtagcggcggtggtgccaatggtacctctttcagctacacattccatggagaccctcatgccatgtttgctgagttcttcggtggcagaaatccctttgacaccttttttgggcagcggaacggggaggaaggcatggacattgatgacccattctctggcttccctatgggcatgggtggcttcaccaacgtgaactttggccgctcccgctctgcccaagagcccgcccgaaagaagcaagatcccccagtcacccacgaccttcgagtctcccttgaagagatctacagcggctgtaccaagaagatgaaaatctcccacaagcggctaaaccccgacggaaagagcattcgaaacgaagacaaaatattgaccatcgaagtgaagaaggggtggaaagaaggaaccaaaatcactttccccaaggaaggagaccagacctccaacaacattccagctgatatcgtctttgttttaaaggacaagccccacaatatctttaagagagatggctctgatgtcatttatcctgccaggatcagcctccgggaggctctgtgtggctgcacagtgaacgtccccactctggacggcaggacgatacccgtcgtattcaaagatgttatcaggcctggcatgcggcgaaaagttcctggagaaggcctccccctccccaaaacacccgagaaacgtggggacctcattattgagtttgaagtgatcttccccgaaaggattccccagacatcaagaaccgtacttgagcaggttcttccaatatagctatctgagctccccaaggactgaccagggacctttccagagctcaaggatttctggacctttctaccagttgtggaccatgagagggtgggagggcccagggagggctttcgtactgctgaatgttttccagagcatatattacaatctttcaaagtcgcacactagacttcagtggtttttcgagctatagggcatcaggtggtgggaacagcaggaaaaggcattccagtctgccccactgggtctggcagccctcccgggatgggcccacatccacctccagtccctggccaggggtgagaggcagaccagcagatggacttgatccctctgtgtctttgggcttctggctggtagataatgtcaacctgcagtcttgattcccagaccctgtacactcctccttttctgttgtgtgatcagtttgtgctttattctgtatttgtctcccatgtcttgctcttctcctggagaattctgtcttctctttggccatctcaaattgagaacctaaactattcctgcagaactgcctggttggcgtccacaagcaatacctctcgttccagcaggaccaagggagccagcctccagtgagtgactccagcaagtgcagccacctctcccttgatggtctgggagcctggcctcagcaaggggccttcctgacctctggctccagtgaagctgaatgtcctcactttgtgggtcacactctttacatttctgtaaggcaatcttggcacacgtggggcttaccagtggcccaggtaattttttgtttcatggactatggactctttcaaagggatctgatccttttgaattttgcacagccctagatacaatcccttttgataaaagggtctttgcttctgattacaggagcactgtggaacgtctgtaaatatgtttttataattccatgtatagttggtgtacactcaaaacctgtccccggcagccagtgctctctgtatagggccataatggaattctgaagaaatcttggggagggaaggggagttggaacaaatgtctgttccctggaggccagtccagtgctcagacctttagactcattgtaagttgccactgccaacatgagaccaaagtgtgtgactagtcaatgaagtgcgacagcattaaagactgatgctaaacctc

SEQ ID NO: 453 - DNA, 880 bp, Homo sapiens
  ref <308>: DATABASE ACCESSION NUMBER: NCBI / NM_033142
  ref <309>: DATABASE ENTRY DATE: 2011-10-22
  ref <313>: RELEVANT RESIDUES IN SEQ ID NO: (1)..(880)
tccagcacctttctcgggtcacggcctcctcctggttcccaagaccccaccataggcagaggcaggccttcctacaccctactctctgtgcctccagcctcgactagtccctagcactcgacgactgagtctcagaggtcacttcaccgtggtctccgcctcatccttggcgctagaccactgaggggagaggactggggtgctccgctgagccactcctgtgcctccctggccttgtctacttctcgccccccgaagggttagtgtccagctcactccagcatcctacaacctcctggtggccttgacgcccccacaaacccgaggtataaagccaggtacaccaggcaggggacgcaccaaggatggagatgttccaggggctgctgctgttgctgctgctgagcatgggcgggacatgggcatccagggagatgcttcggccacggtgccgccccatcaatgccaccctggctgtggagaaggagggctgccccgtgtgcatcaccgtcaacaccaccatctgtgccggctactgccccaccatgacccgcgtgctgcagggggtcctgccggccctgcctcaggtggtgtgcaactaccgcgatgtgcgcttcgagtccatccggctccctggctgcccgcgcggcgtgaaccccgtggtctcctacgccgtggctctcagctgtcaatgtgcactctgccgccgcagcaccactgactgcgggggtcccaaggaccaccccttgacctgtgatgacccccgcttccaggcctcctcttcctcaaaggcccctccccccagccttccaagtccatcccgactcccggggccctcagacaccccgatcctcccacaataaaggcttctcaatccgca

SEQ ID NO: 454 - DNA, 2017 bp, Homo sapiens
  ref <308>: DATABASE ACCESSION NUMBER: NCBI / NM_006351
  ref <309>: DATABASE ENTRY DATE: 2011-08-14
  ref <313>: RELEVANT RESIDUES IN SEQ ID NO: (1)..(2017)
aggcattccctacccttttaatgccccgccctatgacggacccaatcggagggctctccctacccgaaaccccgctcctggagcggcttttctcaggcttgcgcggctctaggccgaagcggcggatgacgcaaccgggccgcgccgcgagaaggtcacacgattctccaacatggcggcggcggccctgcggagtggctggtgccgctgtccacggagatgcctcggcagtggaatccaatttctttccagccacaacctaccccatgggtcgacctatcagatgcgccggccgggcggagagctgccactgtccaaatcatattcttctggaaacagaaaaggctttctgtccggcttgctagataatgtcaaacaagaattagccaaaaacaaagaaatgaaagaaagtataaaaaaattccgtgacgaggccagaaggctagaagaatcagacgtgctccaggaggccagaaggaaatacaaaaccatcgagtcagaaaccgtgcggacgagcgaggtgctacggaagaagcttggggagctgacgggcaccgtgaaggagagccttcacgaagtcagtaaaagtgatctcggccggaaaatcaaggagggcgtggaggaagcagccaagacggccaagcagtcggccgagtcggtatccaaaggcggggagaagctgggcaggacagcggccttcagagccctctcccagggggtggagtccgtgaagaaggaaattgacgacagcgtcctgggacagaccgggccctaccggaggccccagcgactccggaagagaacggagtttgcgggagataagttcaaggaggagaaagtgtttgagccaaacgaggaggccctgggggtcgtgctgcacaaggactccaagtggtaccagcagtggaaggacttcaaggagaacaacgtggtgtttaaccggttcttcgagatgaagatgaagtatgacgaaagcgacaacgcgttcatccgggcatcccgggcccttacggacaaggtcaccgacttgctggggggcctgttctccaagacagagatgtcggaggtgctcacggagatcctccgggtggacccggcctttgacaaggaccggtttctgaaacagtgcgagaacgacatcatccccaatgtcctggaggccatgatttctggagagcttgacattctcaaagactggtgctatgaagctacttacagccagctggcccaccccatccagcaggccaaggcactgggtctccagttccattctcgcatcctagacattgacaacgtcgacctggccatgggcaagatgatggagcaggggccggtgctgatcatcaccttccaggcacagctggtgatggtggtcaggaaccccaaaggcgaggtggtggagggtgacccggacaaggtgctgcggatgctgtacgtgtgggcgctctgccgagaccaggacgagctcaacccctacgcggcctggcggctcctggacatctcggcctccagcaccgagcagattctctgagtgtggtgccggagccaggtagccccggcctgggtcatcaggcacagaggcaccgcaacaccacctgcggcaactccagacctctgggaacaagactgcgggctctgcccccagctctgccaggacggctgcaagaccagctggcccgggaggggacaacgggctgttgcgggtgcgcggcagctggagacactcccccgcagggccaacccctgccctgttgctctgccctgcaggggtcccggcgcctggtcacctggggtgcacacaggtcacacagtgccaagaggccccagggcccagggactccccccacagcagggtgggacccgggacccgcggctcagtggcccgctagccacgtcagccaagccactttaggtccattttttaattttaacagtgctcttccatcttgtgcataagcctgagatttggaaagaataaaacaccgaattgcagaagagcaaaaaaaaaaaaaaaaaa

SEQ ID NO: 455 - DNA, 1853 bp, Homo sapiens
  ref <308>: DATABASE ACCESSION NUMBER: NCBI / NM_014281
  ref <309>: DATABASE ENTRY DATE: 2011-11-20
  ref <313>: RELEVANT RESIDUES IN SEQ ID NO: (1)..(1853)
atcgcgcgagacagcggaaggagcaagagtgggaggcgcgcgcggaggccgcgacggacgcaagatggcgacggcgaccatagctctccaggtcaatggccagcaaggaggggggtccgagccggcggcggcggcggcagtggtggcagcgggagacaaatggaaacctccacagggcacagactccatcaagatggagaacgggcagagcacagccgccaagctggggctgcctcccctgacgcccgagcagcaggaggcccttcagaaggccaagaagtacgccatggagcagagcatcaagagtgtgctggtgaagcagaccatcgcgcaccagcagcagcagctcaccaacctgcagatggcggctcagcggcagcgggcgctggccatcatgtgccgcgtctacgtgggctctatctactatgagctgggggaggacaccatccgccaggcctttgccccctttggccccatcaagagcatcgacatgtcctgggactccgtcaccatgaagcacaagggctttgccttcgtggagtatgaggtccccgaagctgcacagctggccttggagcagatgaactcggtgatgctggggggcaggaacatcaaggtgggcagacccagcaacatagggcaggcccagcccatcatagaccagttggctgaggaggcacgggccttcaaccgcatctacgtggcctctgtgcaccaggacctctcagacgatgacatcaagagcgtgtttgaggcctttggcaagatcaagtcctgcacactggcccgggaccccacaactggcaagcacaagggctacggcttcattgagtacgagaaggcccagtcgtcccaagatgctgtgtcttccatgaacctctttgacctgggtggccagtacttgcgggtgggcaaggctgtcacaccgcccatgcccctactcacaccagccacgcctggaggcctcccacctgccgctgctgtggcagctgctgcagccactgccaagatcacagctcaggaagcagtggccggagcagcggtgctgggtaccctgggcacacctggactggtgtccccagcactgaccctggcccagcccctgggcactttgccccaggctgtcatggctgcccaggcacctggagtcatcacaggtgtgaccccagcccgtcctcctatcccggtcaccatcccctcggtgggagtggtgaaccccatcctggccagccctccaacgctgggtctcctggagcccaagaaggagaaggaagaagaggagctgtttcccgagtcagagcggccagagatgctgagcgagcaggagcacatgagcatctcgggcagtagcgcccgacacatggtgatgcagaagctgctccgcaagcaggagtctacagtgatggttctgcgcaacatggtggaccccaaggacatcgatgatgacctggaaggggaggtgacagaggagtgtggcaagttcggggccgtgaaccgcgtcatcatctaccaagagaaacaaggcgaggaggaggatgcagaaatcattgtcaagatctttgtggagttttccatagcctctgagactcataaggccatccaggccctcaatggccgctggtttgctggccgcaaggtggtggctgaagtgtacgaccaggagcgttttgataacagtgacctctctgcgtgacagtggtccctctccccggacttgcacttgttccttgtttcctctgggttttatagtgatacagtggtgtccccggggccaggcgcgctctgcccagcccagcctacagtgcggataaaggtgcggatgctgctggccctgaaaaaaaaaaaaaaaaaaa

SEQ ID NO: 456 - DNA, 2100 bp, Homo sapiens
  ref <308>: DATABASE ACCESSION NUMBER: NCBI / NM_012106
  ref <309>: DATABASE ENTRY DATE: 2011-11-20
  ref <313>: RELEVANT RESIDUES IN SEQ ID NO: (1)..(2100)
agtcaccgaggcccggacctgcggcgtcggcggcgcgcgcagagggccaggcgggcgtagaggccggaccgacgcgtggcggcagagggtatccaaggccggacctggcgcgcaggcgctgacccgacctggcagtgagctggccgcggccttggctgagaggccttaaccccgccgggcggccgcgccctgcatgcgagttgggccgcgggcggggttggagcctactcggggcgactgcgatggacgccttagaaggagagagctttgcgctgtctttctcctccgcctctgatgcagaatttgatgctgtggttggatatttagaggacattatcatggatgacgagttccagttattacagagaaatttcatggacaagtactacctggagtttgaagacacagaagagaataaactcatctacacacctatttttaatgaatacatttctttggtagaaaaatacattgaagaacagctgctgcagcggattcctgagttcaacatggcagccttcaccacaacattacagcaccataaggatgaagtggctggtgacatattcgacatgctgctcaccttcacagattttctggcttttaaagaaatgtttttggactacagagcagaaaaagaaggccgaggactggacttaagcagtggcttagtggtgacttcattgtgcaaatcatcttctctgccagcttcccagaacaatctgcggcactaggtcctacctccagccaatgaatgggatcattctggatgtcaccagcccaataggctcagctcatgatgacagaacacatcttggaaagactgactctgttatgtaactcttcatttatgttaagtattaataggtcaaaaccaaaatgacctaaccctcctggacctatttatcctgaaacaccttcttgtattcattaaccatagtactcctccccacctcaagtagacacctctctcaggagcttctgagtcagacgcctctggagcgagccctatgtcaggcactccacctggggggcccttccccagcatacctgctggtgtgtaagtgtggactaacccgccgccaccaccctctgttccagcaggctctgcatgaatctttgtgcacttgcacctctttttcacatgggccacagtttcagtacttcagcctcagtggggttcctgatgtttatctagggtgttactcaagcccagtttgagattttggagtctcctgtgatcacatcttgtctcggctgtaggaatcaacagaaggagacgtcctctacataaaagctccatgtgaaaagctactcctagtcttaacatttgcagtccttgtgtcactgtcttctggtcctgatgtagtcccactgtttctagaagtctcttttaagcattatttttgaaaaaaaaaatatttttatagatgaatactcaggctaacctagtggatgtgatcttggaacttccatgattatccacttaaagatcaaagtattatatgctgtgtgctttttaggtgtttgttagtactgtgaaggcaaaaatgctttctacattgacattcattcctattttactgggcacctatgaatgtatgctgtgtgctagaaatagactaaaacatattcctatagcatgttagtgtgtttgcatgtttgctgaaaatcctttgtgtataaaccagtttgtaaggttctctgggttaggtagggactctgcagtttcttcctgtcaaaatctctcctaccaagatggtgttccactgtccagcccagcatgagtagcaggtagagcacagctttactggctgtttgtatgctttggtttagtgcaatgtgtggtagattacttatcagaaaacatatatgtcatctctagaacgaagaaaaagcatagtagttcaattcccagtgtgtccctttgattttttttttttaatagtaaaaataagaatctgtactgacttttcacttggccattctggttttaaaggacaagctacaagctctgtgtttctgtactgatgtgtcacttattaaatacttttgtaccatgagtaaaacttcaggtgtttcgcaagaaccaccattctc

SEQ ID NO: 457 - DNA, 2595 bp, Homo sapiens
  ref <308>: DATABASE ACCESSION NUMBER: NCBI / NM_021975
  ref <309>: DATABASE ENTRY DATE: 2012-01-01
  ref <313>: RELEVANT RESIDUES IN SEQ ID NO: (1)..(2595)
agcgcgcaggcgcggccggattccgggcagtgacgcgacggcgggccgcgcggcgcatttccgcctctggcgaatggctcgtctgtagtgcacgccgcgggcccagctgcgaccccggccccgcccccgggaccccggccatggacgaactgttccccctcatcttcccggcagagccagcccaggcctctggcccctatgtggagatcattgagcagcccaagcagcggggcatgcgcttccgctacaagtgcgaggggcgctccgcgggcagcatcccaggcgagaggagcacagataccaccaagacccaccccaccatcaagatcaatggctacacaggaccagggacagtgcgcatctccctggtcaccaaggaccctcctcaccggcctcacccccacgagcttgtaggaaaggactgccgggatggcttctatgaggctgagctctgcccggaccgctgcatccacagtttccagaacctgggaatccagtgtgtgaagaagcgggacctggagcaggctatcagtcagcgcatccagaccaacaacaaccccttccaagttcctatagaagagcagcgtggggactacgacctgaatgctgtgcggctctgcttccaggtgacagtgcgggacccatcaggcaggcccctccgcctgccgcctgtcctttctcatcccatctttgacaatcgtgcccccaacactgccgagctcaagatctgccgagtgaaccgaaactctggcagctgcctcggtggggatgagatcttcctactgtgtgacaaggtgcagaaagaggacattgaggtgtatttcacgggaccaggctgggaggcccgaggctccttttcgcaagctgatgtgcaccgacaagtggccattgtgttccggacccctccctacgcagaccccagcctgcaggctcctgtgcgtgtctccatgcagctgcggcggccttccgaccgggagctcagtgagcccatggaattccagtacctgccagatacagacgatcgtcaccggattgaggagaaacgtaaaaggacatatgagaccttcaagagcatcatgaagaagagtcctttcagcggacccaccgacccccggcctccacctcgacgcattgctgtgccttcccgcagctcagcttctgtccccaagccagcaccccagccctatccctttacgtcatccctgagcaccatcaactatgatgagtttcccaccatggtgtttccttctgggcagatcagccaggcctcggccttggccccggcccctccccaagtcctgccccaggctccagcccctgcccctgctccagccatggtatcagctctggcccaggccccagcccctgtcccagtcctagccccaggccctcctcaggctgtggccccacctgcccccaagcccacccaggctggggaaggaacgctgtcagaggccctgctgcagctgcagtttgatgatgaagacctgggggccttgcttggcaacagcacagacccagctgtgttcacagacctggcatccgtcgacaactccgagtttcagcagctgctgaaccagggcatacctgtggccccccacacaactgagcccatgctgatggagtaccctgaggctataactcgcctagtgacaggggcccagaggccccccgacccagctcctgctccactgggggccccggggctccccaatggcctcctttcaggagatgaagacttctcctccattgcggacatggacttctcagccctgctgagtcagatcagctcctaagggggtgacgcctgccctccccagagcactgggttgcaggggattgaagccctccaaaagcacttacggattctggtggggtgtgttccaactgcccccaactttgtggatgtcttccttggaggggggagccatattttattcttttattgtcagtatctgtatctctctctctttttggaggtgcttaagcagaagcattaacttctctggaaaggggggagctggggaaactcaaacttttcccctgtcctgatggtcagctcccttctctgtagggaactctggggtcccccatccccatcctccagcttctggtactctcctagagacagaagcaggctggaggtaaggcctttgagcccacaaagccttatcaagtgtcttccatcatggattcattacagcttaatcaaaataacgccccagataccagcccctgtatggcactggcattgtccctgtgcctaacaccagcgtttgaggggctggccttcctgccctacagaggtctctgccggctctttccttgctcaaccatggctgaaggaaaccagtgcaacagcactggctctctccaggatccagaaggggtttggtctgggacttccttgctctccctcttctcaagtgccttaatagtagggtaagttgttaagagtgggggagagcaggctggcagctctccagtcaggaggcatagtttttactgaacaatcaaagcacttggactcttgctctttctactctgaactaataaatctgttgccaagctggctagaaaaaaaaaaaaaaaaaa

SEQ ID NO: 458 - DNA, 4685 bp, Homo sapiens
  ref <308>: DATABASE ACCESSION NUMBER: NCBI / NM_014874
  ref <309>: DATABASE ENTRY DATE: 2011-12-18
  ref <313>: RELEVANT RESIDUES IN SEQ ID NO: (1)..(4685)
atgatgcagtgggagtccgagcctctgcgtcgtccgcttgggacgcgccggcggaggagtggcgcgcggaggagtggcgcgctgagacgccgctcgaagcgccgagtcgcggggcagcagaggcgtaaggagtaggcggggcgagccggctgggctcagggtccaccagctcacccgggtcgaggggcaatctgaggcgactggtgacgcgcttatccacttccctcctcccgcctccccctggggtggcgctcgctggtgacgtagtgagtgtgatggccgccgcgaggccgggaaggtgaagtcaggactggtggagtcaacacagtcaatcaatagccaacctcaacctgagacaggacagaagagaactcagaatctttttgtcttttggacttcagccatgtccatgatgcctaccctgtgaagatctctcaccatccaaaaaacgcaatgtccctgctcttctctcgatgcaactctatcgtcacagtcaagaaaaataagagacacatggctgaggtgaatgcatccccacttaagcactttgtcactgccaagaagaagatcaatggcatttttgagcagctgggggcctacatccaggagagcgccaccttccttgaagacacgtacaggaatgcagaactggaccccgttaccacagaagaacaggttctggacgtcaaaggttacctatccaaagtgagaggcatcagtgaggtgctggctcggaggcacatgaaagtggctttttttggccggacgagcaatgggaagagcaccgtgatcaatgccatgctctgggacaaagttctgccctctgggattggccacaccaccaattgcttcctgcgggtagagggcacagatggccatgaggcctttctccttaccgagggctcagaggaaaagaggagtgccaagactgtgaaccagctggcccatgccctccaccaggacaagcagctccatgccggcagcctagtgagtgtgatgtggcccaactctaagtgcccacttctgaaggatgacctcgttttgatggacagccctggtattgatgtcaccacagagctggacagctggattgacaagttttgtctggatgctgatgtgtttgtgctggtggccaactcagagtccaccctgatgcagacggaaaagcacttcttccacaaggtgagtgagcgtctctcccggccaaacatcttcatcctgaacaaccgctgggatgcatctgcctcagagcccgagtacatggaggaggtgcggcggcagcacatggagcgttgtaccagcttcctggtggatgagctgggcgtggtggatcgatcccaggccggggaccgcatcttctttgtgtctgctaaggaggtgctcaacgccaggattcagaaagcccagggcatgcctgaaggagggggcgctctcgcagaaggctttcaagtgaggatgtttgagtttcagaattttgagaggagatttgaggagtgcatctcccagtctgcagtgaagaccaagtttgagcagcacacggtccgggccaagcagattgcagaggcggttcgactcatcatggactccctgcacatggcggctcgggagcagcaggtttactgcgaggaaatgcgtgaagagcggcaagaccgactgaaatttattgacaaacagctggagctcttggctcaagactataagctgcgaattaagcagattacggaggaagtggagaggcaggtgtcgactgcaatggccgaggagatcaggcgcctctctgtactggtggacgattaccagatggacttccacccttctccagtagtcctcaaggtttataagaatgagctgcaccgccacatagaggaaggactgggtcgaaacatgtctgaccgctgctccacggccatcaccaactccctgcagaccatgcagcaggacatgatagatggcttgaaacccctccttcctgtgtctgtgcggagtcagatagacatgctggtcccacgccagtgcttctccctcaactatgacctaaactgtgacaagctgtgtgctgacttccaggaagacattgagttccatttctctctcggatggaccatgctggtgaataggttcctgggccccaagaacagccgtcgggccttgatgggctacaatgaccaggtccagcgtcccatccctctgacgccagccaaccccagcatgcccccactgccacagggctcgctcacccaggaggagttcatggtttccatggttaccggcctggcctccttgacatccaggacctccatgggcattcttgttgttggaggagtggtgtggaaggcagtgggctggcggctcattgccctctcctttgggctctatggcctcctctacgtctatgagcgtctgacctggaccaccaaggccaaggagagggccttcaagcgccagtttgtggagcatgccagcgagaagctgcagcttgtcatcagctacactggctccaactgcagccaccaagtccagcaggaactgtctgggacctttgctcatctgtgtcagcaagttgacgtcacccgggagaacctggagcaggaaattgccgccatgaacaagaaaattgaggttcttgactcacttcagagcaaagcaaagctgctcaggaataaagccggttggttggacagtgagctcaacatgttcacacaccagtacctgcagcccagcagatagtgggcacctgaggcggagtctgcgtggagaggggcggtgctgccagccctaagtgccatgtgggctcccccaggggcacgtgtggctcctgccccctggccactgccaagagaatgaagcacccagtctcgtaccattttgagccctccagcactacttattttcccccacctttgcctgctgttgctggaagagctggctcatacccccaaaggacactttcagcgacagctatggacagcatggtaccaaggagttaagttgaggctttttccagctttctctggttcatttgattgcttgataaggcctcaggatctcagcattgcacaatgcctcatggaagcctttgagggtatcacacagacacccccaccttcctccagcctgtgcgcacctgccctccttgcagcccagcacacctgcaggtgtaagggacgattggagtttcttcccagagagtctgtcccagaaggactgtggcttgtgtgtgtccatctcgcctgttggctcagtgcttcatcccatttgcagagcctcagacacgtcttggtggtgaggctcagttacccctgggcttaggctgaggcgggccctgtgctgggggtggtagaaaggatgctgctgaggcagctggaggagtgggagtagctcagaggggagggctgttggatgtatggggagctggcagagcaggtggcagtcactgggacaaggagggacttgcctctcttctcattattgtgtcctttgctttagtgtcagtcctggacttgtgcaggcctgttttgtgtagatctgttttggaagatggcatggtctaggtggttgaaggatgtagtagaaggatggatggtggaaggtggggacgttggtggctggctgaggtgcatgggccccacacaggacagctggagaatgggccgtccacttggcctcgttctgcgaggggctcatgggtctgagagcccccacccactaggcttgattgcatccctgttgtgccctttaagagacatgtttccaccccacccccaaccttgtcccaagtgccctggactaaatttcctgtgccagtgactgcagttggccaagggacaatgtggaaaacccagtgtccatctttccaccctccctgatctccagaaccttcgactgacccccttgtctttatgctgatgttgagttttgggattgttactggttgaagtgggggcagatgcctgtcaccaaggtgttgactgtgtgagaaaagcagtttgggtgacaaatcctgtgtggcacaagttggatcgcttcctagaaataagcaacacctctcccaaaaagcagcccacaaggcaggggcccagcagcccagccatcactcatctttgaggaaatgagttggtagcctctgtgcactgtttggtggccacatcacaggtgatgtcctgttcacatacctgcttgtatttaaagccctcagtctgtcctgttgtgtggggcgaagtgatggactctgccaggtggacatgctgtgggtggatgttcccggcgtgtgccgggcctgaatggacaggggccacttcacagcatgtcagggaaaatcactgtcacacaattccaatggattttgtgctctttttgaaaaaaaaaaattctttagcgtaaacatgaattttttttcaatgtagcccctggggaatgaatgaaattttgagcttcttcaatacgtaaaattaaatttataccactgagggagagaccctttctgaaagaagtatggccaaaagcactttaatgctgctgacattgttgtttttatgttcatttgctggagcgcaagacgtgctgacacagtgagttttctctgatgtatttaaggtgatgtatttgcttgagttactcctgtatcattgctcataatattggaaactaaaataaaacctagttggaaatcctttgtgaaaaaaaaa

SEQ ID NO: 459 - DNA, 3223 bp, Homo sapiens
  ref <308>: DATABASE ACCESSION NUMBER: NCBI / NM_006796
  ref <309>: DATABASE ENTRY DATE: 2011-12-19
  ref <313>: RELEVANT RESIDUES IN SEQ ID NO: (1)..(3223)
gccgacgtcagcgcgccggggcggggctggcggcaggagacgccgcgttgagagcttgggctcctccgtgagccgccggcgcgcttcgctgcctggcggcctttccccgagccgagcccgcttcccgaggccgccagtcgtcgcctgcccgcgcctgcgcagcgtcccgggccgagagggccacggcggcggccatggcgcaccgctgtttgcggctgtggggccggggcggctgctggccccgcggcctacagcagctcctcgtgcctggcggcgtgggcccgggcgagcagccctgcctccggacgctttaccgatttgttacaactcaagcaagggccagcagaaattctcttttgacagatataattgctgcttatcaaagattctgttctcgacccccaaaaggatttgaaaaatactttcctaatggaaaaaatggaaaaaaagctagtgaacctaaagaagttatgggagagaaaaaagaatcaaagccagctgctaccacacgctcttctggaggaggaggtggtggcggtggaaaacgaggtggcaagaaagatgattctcactggtggtccaggtttcagaagggtgacattccatgggacgacaaggatttcaggatgttcttcctctggactgctctgttctggggtggagtcatgttttacttgctgctcaagagatccgggagagaaatcacttggaaggactttgtcaataactatctttcaaaaggagtagtagacagattggaagtcgtcaacaagcgttttgttcgagtgacctttacaccaggaaaaactcctgttgatgggcaatacgtttggtttaatattggcagtgtggacacctttgaacggaatctggaaactttacagcaggaattgggcatagaaggagaaaatcgggtgcctgttgtctacattgctgaaagtgatggctcttttctgctgagcatgctgcctacggtgctcatcatcgccttcttgctctacaccatcagaagagggcctgctggcattggccggacaggccgagggatgggcggactcttcagtgtcggagaaaccactgccaaggtcttaaaggatgaaattgatgtgaagttcaaagatgtggctggctgtgaggaggccaagctagagatcatggaatttgtgaatttcttgaaaaacccaaagcagtatcaagacctaggagcaaaaatcccaaagggtgccattctcactggtcctccaggcactgggaagacgctgctagctaaggccacagccggagaagccaatgtccccttcatcaccgttagtggatctgagtttttggagatgttcgttggtgtgggccctgctagagtccgagacttatttgcccttgctcggaagaatgccccttgcatcctcttcatcgatgaaatcgatgcggtgggaaggaagagaggaagaggcaactttggagggcagagtgagcaggagaacacactcaaccagctgctggtggagatggatggttttaatacaacaacaaatgtcgtcattttggccggcaccaatcgaccagatatcctggaccccgcgctgcttaggccggggcgtttcgacaggcagatctttattggaccaccagacataaaaggaagagcttctattttcaaagttcatctccgaccgctaaaactggacagtaccctggagaaggataaattggcaagaaaactggcatctttaactccagggttttcaggtgctgatgttgctaatgtctgtaatgaagctgcgttgattgctgcaaggcatctgtcagattccataaatcagaaacactttgaacaggcaattgaacgagtgattggtggcttagagaagaaaacgcaggttctgcagcctgaggagaagaagactgtggcataccacgaagcaggccatgcggttgccggctggtatctggagcacgcagacccgcttttaaaggtatccatcatcccacgtggcaaaggactaggttatgctcagtatttaccaaaagaacaatacctctataccaaagagcagctcttggataggatgtgtatgactttaggtggtcgagtctctgaagaaatcttctttggaagaattacaactggtgctcaagatgacttgagaaaagtaactcagagtgcatatgcccaaattgttcagtttggcatgaatgaaaaggttgggcaaatctcctttgacctcccacgtcagggggacatggtattggagaaaccttacagtgaagccactgcaagattgatagatgatgaagtacgaatacttattaatgatgcttataaaagaacagtagctcttctcacagaaaagaaagctgacgtggagaaggttgctcttctgttgttagaaaaagaagtattagataagaatgatatggttgaacttttgggccccagaccatttgcggaaaaatctacctatgaagaatttgtggaaggcactggcagcttggatgaggacacctcacttccagaaggccttaaggactggaacaaggagcgggaaaaggagaaagaggagcccccgggtgagaaagttgccaactagaggcccagagggaggccatctcagtctgtccactgtggtttcagctggtgcattatttcagctgtggctttcagaagaatgggaatgctgcgctgattttagccagccactggcccagctgaaatgatggggaaaggagtccttagtcctttcagcctcagaggtcacagtgggtggcaggtgactttccggaggccttgagggaaatgcacactgtcccatagcctcattgggctcccagacgtgctggaaaggttgagcccagagtggccgaggctggaccctgtggcaccaagtggggtcggctgaccgtgtggcagggatcgttgcactggactcttggcgtgtgggaagggatgctttctctttgtcgcccactcttcattcctgtttctcctcagttcccctgtgcagatgggctgtgaaattaaattggagtcttgataagaacattttaatttgacttaatattttaaagattgaatccagatcacttgttgctgtcttaatggaatggttttctacaggagctgtaacatacttaaaaatatgaatgtattatgtaaatatggcttctttacataaaaaataaaatgtcaacactgtacttttctgaacacaaaaaaaaaaaaaaa

SEQ ID NO: 460 - DNA, 1488 bp, Homo sapiens
  ref <308>: DATABASE ACCESSION NUMBER: NCBI / NM_006666
  ref <309>: DATABASE ENTRY DATE: 2011-11-20
  ref <313>: RELEVANT RESIDUES IN SEQ ID NO: (1)..(1488)
gttggtgagcatcatggcaaccgttacagccacaaccaaagtcccggagatccgtgatgtaacaaggattgagcgaatcggtgcccactcccacatccggggactggggctggacgatgccttggagcctcggcaggcttcgcaaggcatggtgggtcagctggcggcacggcgggcggctggcgtggtgctggagatgatccgggaagggaagattgccggtcgggcagtccttattgctggccagccgggcacggggaagacggccatcgccatgggcatggcgcaggccctgggccctgacacgccattcacagccatcgccggcagtgaaatcttctccctggagatgagcaagaccgaggcgctgacgcaggccttccggcggtccatcggcgttcgcatcaaggaggagacggagatcatcgaaggggaggtggtggagatccagattgatcgaccagcaacagggacgggctccaaggtgggcaaactgaccctcaagaccacagagatggagaccatctacgacctgggcaccaagatgattgagtccctgaccaaggacaaggtccaggccggggacgtgatcaccatcgacaaggcgacgggcaagatctccaagctgggccgctccttcacacgcgcccgcgactacgacgctatgggctcccagaccaagttcgtgcagtgcccagatggggagctccagaaacgcaaggaggtggtgcacaccgtgtccctgcacgagatcgacgtcatcaactctcgcacccagggcttcctggcgctcttctcaggtgacacaggggagatcaagtcagaagtccgtgagcagatcaatgccaaggtggctgagtggcgcgaggagggcaaggcggagatcatccctggagtgctgttcatcgacgaggtccacatgctggacatcgagagcttctccttcctcaaccgggccctggagagtgacatggcgcctgtcctgatcatggccaccaaccgtggcatcacgcgaatccggggcaccagctaccagagccctcacggcatccccatagacctgctggaccggctgcttatcgtctccaccaccccctacagcgagaaagacacgaagcagatcctccgcatccggtgcgaggaagaagatgtggagatgagtgaggacgcctacacggtgctgacccgcatcgggctggagacgtcactgcgctacgccatccagctcatcacagctgccagcttggtgtgccggaaacgcaagggtacagaagtgcaggtggatgacatcaagcgggtctactcactcttcctggacgagtcccgctccacgcagtacatgaaggagtaccaggacgccttcctcttcaacgaactcaaaggcgagaccatggacacctcctgagttggatgtcatcccccgaccccaccctgttttccaccagagttctgacactgtgactctgtataaaatggttgggaagctgc

SEQ ID NO: 461 - DNA, 5804 bp, Homo sapiens
  ref <308>: DATABASE ACCESSION NUMBER: NCBI / NM_005219
  ref <309>: DATABASE ENTRY DATE: 2011-12-18
  ref <313>: RELEVANT RESIDUES IN SEQ ID NO: (1)..(5804)
attcatgaggcgcgcgcagcccggcatgctaatgaggcggggcgcggcggctggctaaagagcgactgggcggcggcgggcgcggagctgccaggcgggagcggcgtaggcgcggggtcgccggccagcgtgaaccgggacatggagccgcccggcgggagcctggggcccggccgcgggacccgggacaagaagaagggccggagcccagatgagctgccctcggcgggcggcgacggcggcaaatctaagaaatttactctgaagcggctcatggcagatgagctggagagatttaccagcatgagaattaagaaggagaaggaaaagcccaattctgctcatagaaattcttctgcatcatatggggatgatcccacagcacagtcattgcaagatgtttcagatgaacaagtgctggttctctttgaacagatgctgctggatatgaacctgaatgaggagaaacagcaacctttgagggagaaggacatcatcatcaagagggagatggtgtcccaatacttgtacacctccaaggctggcatgagccagaaggagagctctaagtctgccatgatgtatattcaggagttgaggtcaggcttgcgggatatgcctctgctcagctgcctggagtcccttcgtgtgtctctcaacaacaaccctgtcagttgggtgcaaacatttggtgctgaaggcttggcctccttattggacattcttaaacgacttcatgatgagaaagaagagactgctgggagttacgatagccggaacaagcatgagatcattcgctgcttgaaagcttttatgaacaacaagtttggaatcaagaccatgttggagacagaagaaggaatcctactgctggtcagagccatggatcctgctgttcccaacatgatgattgatgcagctaagctgctttctgctctttgtattctaccgcagccagaggacatgaatgaaagggttttggaggcaatgacagaaagagctgagatggatgaagtggaacgtttccagccgctgctggatggattaaaaagtggaaccactattgcactgaaggttggatgcctacagctgatcaatgctctcatcacaccagcggaggaacttgacttccgagttcacatcagaagtgaactgatgcgtttggggctacatcaggtgttgcaggaccttcgagagattgaaaatgaagatatgagagtgcaactaaatgtgtttgatgaacaaggggaagaggattcctatgacctgaagggacggctggatgacattcgcatggagatggatgactttaatgaagtctttcagattctcttaaacacagtgaaggattcaaaggcagagccacacttcctttccatcctgcagcacttactcttggtccgaaatgactatgaggccagacctcagtactataagttgattgaagaatgtatttcccagatagttctgcacaagaacggggctgatcctgacttcaagtgccggcacctccagattgagattgagggattaattgatcaaatgattgataagacaaaggtggagaaatctgaagccaaagctgcagagctggaaaagaagttggactcagagttaacagcccgacatgagctacaggtggaaatgaaaaagatggaaagtgactttgagcagaagcttcaagatcttcagggagaaaaagatgcactgcattctgaaaagcagcaaattgccacagagaaacaggacctggaagcagaggtgtcccagctcacaggagaggttgccaagctgacaaaggaactggaagatgccaagaaagaaatggcttccctctctgcggcagctattactgtacctccttctgttcctagtcgtgctcctgttccccctgcccctcctttacctggtgactctggcactattattccaccaccacctgctcctggggatagtaccactcctcctcctcctcctcctcctcctcctcctccacctcctttgcctgggggtgtttgcatctcctcacccccttctttacctggaggtactgctatctctccaccccctcctttgtctggggatgctaccatccctccaccccctcctttgcctgagggtgttggcatcccttcaccctcttctttgcctggaggtactgccatccccccacctcctcctttgcctgggagtgctagaatccccccaccaccacctcctttgcctgggagtgctggaattccccccccacctcctcccttgcctggagaagcaggaatgccacctcctcctccccctcttcctggtggtcctggaatccctccacctcctccatttcccggaggccctggcattcctccacctccacccggaatgggtatgcctccacctcccccatttggatttggagttcctgcagccccagttctgccatttggattaacccccaaaaagctttataagccagaggtgcagctccggaggccaaactggtccaagcttgtggctgaggacctctcccaggactgcttctggacaaaggtgaaggaggaccgctttgagaacaatgaacttttcgccaaacttacccttaccttctctgcccagaccaagacttccaaagccaagaaggatcaagaaggtggagaagaaaagaaatctgtgcaaaagaaaaaagtaaaagagttaaaggtgttggattcaaagacagcccagaatctctcaatctttttgggttccttccgcatgccctatcaagagattaagaatgtcatcctggaggtgaatgaggctgttctgactgagtctatgatccagaacctcattaagcaaatgccagagccagagcagttaaaaatgctttctgaactgaaggatgaatatgatgacctggctgagtcagagcagtttggcgtggtgatgggcactgtgccccgactgcggcctcgcctcaatgccattctcttcaagctacaattcagcgagcaagtggagaatatcaagccagagattgtgtctgtcactgctgcatgtgaggagttacgtaagagtgagagcttttccaatctcctagagattaccttgcttgttggaaattacatgaatgctggctccagaaatgctggtgcttttggcttcaatatcagcttcctctgtaagcttcgagacaccaagtccacagatcagaagatgacgttgttacacttcttggctgagttgtgtgagaatgactatcccgatgtcctcaagtttccagacgagcttgcccatgtggagaaagccagccgagtttctgctgaaaacttgcaaaagaacctagatcagatgaagaaacaaatttctgatgtggaacgtgatgttcagaatttcccagctgccacagatgaaaaagacaagtttgttgaaaaaatgaccagctttgtgaaggatgcacaggaacagtataacaagctgcggatgatgcattctaacatggagaccctctataaggagctgggcgagtacttcctctttgaccccaagaagttgtctgttgaagaatttttcatggatcttcacaattttcggaatatgtttttgcaagcagtcaaggagaaccagaagcggcgggagacagaagaaaagatgaggcgagcaaaactagccaaggagaaggcagagaaggagcggctagagaagcagcagaagagagagcaactcatagacatgaatgcagagggcgatgagacaggtgtgatggacagtcttctagaagccctgcagtcaggggcagcattccgacggaagagagggccccgtcaagccaacaggaaggccgggtgtgcagtcacatctctgctagcttcggagctgaccaaggatgatgccatggctgctgttcctgccaaggtgtccaagaacagtgagacattccccacaatccttgaggaagccaaggagttggttggccgtgcaagctaatgtgggtcctgtgaccgcggcagctcctcagcggagccgcagactgtcctgccctgcagcatgtgcctaaaggctcaaggggatattcctctggggtggccactcccaccaccctgaccctgtctttctctctggcctgctgctctctcaacatcacatacagcttcagctgcctggaggccagaaggaaagggcagtgcaggggaggcctgagcccgacttagccagccctggctgttgtattaccaaagcagggtccatgtttgctgccttaaccctgtctcctctctgttactcagagggcctcatctcagacaaggcccagcctgctttttctcagccctgactttctaatgggctttcccccctaggtcagtcttgctggatttgtgcttttcttttgtggtttctctggccctgagaatagcatggggcttgtaaacctttgggctagatccctcctttcattgctgttgtctctgctcttccctctcctggctgtggttatttattattagtggtgtggcactgggagctgctcctaaggaagcagggagcaaatcccacctttaccccaccttcctgggaaaggcctccaaagcaaaggatctggaccagtttccctgctgtgctgtggcccaggccagagcctgtgggcaggcaggcagggcatagcgacagtgtgggacctgcccccagcttctgccacgctttatgcccttgcctctctggacgctctgcaccaaccccaggctactgagccaccttccctcctcatgccttccctgagctttggtgcatctcatctggactatgggttgtactgtgaccatcccaacacctcaccctctgtctacaaggaaatgggaggtggagcctcctggctgagaaattgttttgcaaatggatctatttttgtatgaaaaaaaaaatttttttaaagaaaactgttccttccccctttcccctccataatgtaagaagctttggtggcaggttacagagttctgggatttcttctcacaggcccaatcctgaatgtgcccctggaccttctggacccttgagtccaaggcagatcctctctcccagggaatccgacacaggaggaaccccttctctggttgagctgggccaggcctaagagtagcaggaactctaagaccacagagttttttataaatgtataaatgtatcaagccaaatgtgcagatgctaactggacattctggggaactgggcaccaggagtgccttcatacactgtaccccagctctcttctaaaagagaagtgggtgggcacactgaactgtttggtggccccaaccacaggaagctgcaattctctggcttagggtgatacttttgccctccttgtgcccctctcagctttccatccccagctaggaagaaagaatggcactcttgggcttggcccagaattagagttattagagcaagagagagcttaggaagcatgagggcaactatagtgaggccttattgccaggagggagggttttggttgctggcgcttgtgtataaaggggcaagagcagctcctttggactattcctgggaggactctgatgcagggcgtctgttgctcccctgggtcacctcctccctgctcgctgacatctggggctttgaccctttcttttttaatctacttttgctaagatgcatttaataaaaaaaaagagagagagagagaggtgtgagggacaaaatgcaaacctatttcccttgcctcataggcttctgggatgtcatcacctccagtttgttggttttgtttccaactgttaataaagcattgaaacagtaaaaaaaaaaaaaaa

SEQ ID NO: 462 - DNA, 1022 bp, Homo sapiens
  ref <308>: DATABASE ACCESSION NUMBER: NCBI / NM_033546
  ref <309>: DATABASE ENTRY DATE: 2011-12-24
  ref <313>: RELEVANT RESIDUES IN SEQ ID NO: (1)..(1022)
gccttccgctccgccccttcaggcaggaagtgtcggcgccgccactgtccggccacagcctaacgctcttcgctgtcgtttgtggtctcgcgcagggcggccccggttctggtgtttggcgtcggaattaaacaaccaccatgtcgagcaaaaaggcaaagaccaagaccaccaagaagcgccctcagcgtgcaacatccaatgtgtttgccatgtttgaccagtcacagattcaggagttcaaagaggccttcaacatgattgatcagaacagagatggcttcatcgacaaggaagatttgcatgatatgcttgcttctctagggaagaatcccactgatgcataccttgatgccatgatgaatgaggccccagggcccatcaatttcaccatgttcctgaccatgtttggtgagaagttaaatggcacagatcctgaagatgtcatcagaaacgcctttgcttgctttgatgaagaagcaacaggcaccattcaggaagattacctaagagagctgctgacaaccatgggggatcggtttacagatgaggaagtggatgagctgtacagagaagcacctattgacaaaaaggggaatttcaattacatcgagttcacacgcatcctgaaacatggagccaaagacaaagatgactgaaagaactttagctaaaatcttccagttacattgtcttactctcttttacttctcagacacttcccccaccctcatagaacctgttgcatgcaacttagtttcacagctttgcctcttctttttgatgtatttattccagacctttctgccacttagcacttgtataatcagactggaaatggggatgagggtgtaaattgtattgaaaaagatcgcgaataaaaatcaacaaatgtgaaagcccagaaaaatatattcgtatttctggttttgctggatttttacatttttatataataaaaatgttattttgaaataaagattatgctgactcaaatgcaatgtaaaaaaaaaaaaaaaaaa

SEQ ID NO: 463 - DNA, 2290 bp, Homo sapiens
  ref <308>: DATABASE ACCESSION NUMBER: NCBI / NM_032348
  ref <309>: DATABASE ENTRY DATE: 2011-10-22
  ref <313>: RELEVANT RESIDUES IN SEQ ID NO: (1)..(2290)
gtgggacaaagcctggggctgggcgggggccatggcgctgccatcccgaatcctgctttggaaacttgtgcttctgcagagctctgctgttctcctgcactcagggtcctcggtacccgccgctgctggcagctccgtggtgtccgagtccgcggtgagctgggaggcgggcgcccgggcggtgctgcgctgccagagcccgcgcatggtgtggacccaggaccggctgcacgaccgccagcgcgtgctccactgggacctgcgcggccccgggggtggccccgcgcggcgcctgctggacttgtactcggcgggcgagcagcgcgtgtacgaggcgcgggaccgcggccgcctggagctctcggcctcggccttcgacgacggcaacttctcgctgctcatccgcgcggtggaggagacggacgcggggctgtacacctgcaacctgcaccatcactactgccacctctacgagagcctggccgtccgcctggaggtcaccgacggccccccggccacccccgcctactgggacggcgagaaggaggtgctggcggtggcgcgcggcgcacccgcgcttctgacctgcgtgaaccgcgggcacgtgtggaccgaccggcacgtggaggaggctcaacaggtggtgcactgggaccggcagccgcccggggtcccgcacgaccgcgcggaccgcctgctggacctctacgcgtcgggcgagcgccgcgcctacgggcccctttttctgcgcgaccgcgtggctgtgggcgcggatgcctttgagcgcggtgacttctcactgcgtatcgagccgctggaggtcgccgacgagggcacctactcctgccacctgcaccaccattactgtggcctgcacgaacgccgcgtcttccacctgacggtcgccgaaccccacgcggagccgcccccccggggctctccgggcaacggctccagccacagcggcgccccaggcccagaccccacactggcgcgcggccacaacgtcatcaatgtcatcgtccccgagagccgagcccacttcttccagcagctgggctacgtgctggccacgctgctgctcttcatcctgctactggtcactgtcctcctggccgcccgcaggcgccgcggaggctacgaatactcggaccagaagtcgggaaagtcaaaggggaaggatgttaacttggcggagttcgctgtggctgcaggggaccagatgctttacaggagtgaggacatccagctagattacaaaaacaacatcctgaaggagagggcggagctggcccacagccccctgcctgccaagtacatcgacctagacaaagggttccggaaggagaactgcaaatagggaggccctgggctcctggctgggccagcagctgcacctctcctgtctgtgctcctcggggcatctcctgatgctccggggctcaccccccttccagcggctggtcccgctttcctggaatttggcctgggcgtatgcagaggccgcctccacacccctcccccaggggcttggtggcagcatagcccccacccctgcggcctttgctcacgggtggccctgcccacccctggcacaaccaaaatcccactgatgcccatcatgccctcagacccttctgggctctgcccgctgggggcctgaagacattcctggaggacactcccatcagaacctggcagccccaaaactggggtcagcctcagggcaggagtcccactcctccagggctctgctcgtccggggctgggagatgttcctggaggaggacactcccatcagaacttggcagccttgaagttggggtcagcctcggcaggagtcccactcctcctggggtgctgcctgccaccaagagctcccccacctgtaccaccatgtgggactccaggcaccatctgttctccccagggacctgctgacttgaatgccagcccttgctcctctgtgttgctttgggccacctggggctgcaccccctgccctttctctgccccatccctaccctagccttgctctcagccaccttgatagtcactgggctccctgtgacttctgaccctgacacccctcccttggactctgcctgggctggagtctagggctggggctacatttggcttctgtactggctgaggacaggggagggagtgaagttggtttggggtggcctgtgttgccactctcagcaccccacatttgcatctgctggtggacctgccaccatcacaataaagtccccatctgatttttaaaaaaaaaaaaaaaaaa

SEQ ID NO: 464 - DNA, 3614 bp, Homo sapiens
  ref <308>: DATABASE ACCESSION NUMBER: NCBI / NM_024798
  ref <309>: DATABASE ENTRY DATE: 2011-08-15
  ref <313>: RELEVANT RESIDUES IN SEQ ID NO: (1)..(3614)
gctccgggagagttagggctccgagccgagcgcgcggagcagctggggccggggcgcggatgctggaagttcacatcccgtcggtggggcccgaggccgaggggcccaggcagagcccggagaaaagccacatggtgttccgagtggaggtgctgtgcagcgggcgcagacacacggtgccaaggcgctacagcgagttccacgcgctgcacaagcggatcaagaagctgtacaaagtgcccgacttcccctcgaaacgcctgcccaactggaggaccagagggttggaacagcgccggcagggcttggaggcttacatccagggcatcctgtacctgaaccaggaggtgcccaaggagttactggaattcctgagacttcggcacttccccacagaccccaaggctagcaactggggcaccctgagggagttcctgcctggcgacagcagctcccagcagcaccagcggcctgtcctgagcttccatgtggatccctatgtttgcaacccctccccagagtcgctgcccaacgtggtggtgaatggtgtgctccagggcctctacagcttcagcatcagcccagataaagcccagccaaaggcggcctgtcaccctgctcctctgccaccgatgccctgatcagtccagaggcctttggctgcctcctaagaaagtcatgtgcctctgtcctatgaactccatataaggctgggtcctcctttggcctggacccaggacttaattacccagtgcccagttgtgccacattcccactcaaggctcagaacttggctcgcattggtagctggaggtggtagaatttgtatgctcttagagcccaacagccaaggcagggtcaagaagataagtaataaaagaggaagtcagccaggcgcggtggctcatgcctgtaatcccagcactttgggaggccaagatgggtggatcacctgaagtcaggagttcgagaccagcctgaccaccatggagaaaccccgtctctactaaaaatacaaaattagccgggcattgtggtggtgcatgcctgtaatcccagctactcgggaagctgaggtaggagaatctcttttttttttttttttttttttttgagacggagtttcactcttgttgcccaggctggaatgcaatggcacgatctcggctcacggcaacccccgcttcccgggttcaagcaattctcctgcctcagcctctcgagtagctgggattacaggcatccgccaccatgcccggctaatttttgtatttttaatagagatgggtttcaccacgttggccaggctggtcttgtactcctgacgtcaggtgatccacccgcctcggcttcccaaagtgctgggattacgggcgtgagccaccgtgctcggcccaaggcaggagaatctcttgaagccaggaggcggaagttgtggtgagccgagatcgcgccactgcactccagcctgggcaacaagagtgaaactccgtctcaaaataaataaataataaaggaagaagtcagctgggtgcagaggctcatgcctgtaatcccaatactttaggaggccaaggcaggaggatgcttgggtctggaagtttgagaccagccagcgcaacatagtgagacctgtctctaccaaaaaaaaaaaaaaaaaaaaaaaatcaatttagaggtaggctatgaaaaagtacagatacatcccttaacatagactggagggtggtggcaaggggagcaaatgtggaggcccagtagctggcaaagtttagaagcagggggcaaaagctcctgcctgacttttcctgggtagctcctgggtcaaaatttcaggcaggatcccagggaaggggcaggcacccattgccacaggagagttgcaggcatgttgggatgtaggcctaggggaggtgctgcaggctcaagaaccaggcccacacattatatattaaaaaaaaaaaaacccacatttttttttattggtcagtgttggtaggagtttgttacaaaagtgagtccatgggcctgtggaatgtgaggggagtgggtccgctccaccagatgccagcaccggggccagtgcagctcagagccctgtggcggactacagggcctgcacagacggtcactcaaagaaagatgtccctgtgccctactccttggcgatggcaaagggcttctccacctcgatcttgccgcagtctgcgatgatcacatccttcaggggtttatcccggctgtctgtcttggtgctctccaccttccgcaccacctcctggaaaagaaaggtggaagcaggagggcatggtggatcaggaggtccaccgctcaggagaaaggccccagcgtatggctcaggagggctaagacccacaagtgatcaacagcacacaaaactggaggcaccaaaattctaacagactcctggccagagcagggagaatgcagatttgacgagggggtacaggaattttgttcctttgaagtaagacccaggttgggccaagggtgaggaggaggaagagggtgaccagggcatgtggcttctcagggacattgcgttcagctgcactctgtatacctcaggggtgggaccagcacgtcactgagtgaaggaggggagggaggctctggcagttgtgcagccttcctggctgggctctgagggggctggaagaatttagaaccttggaggcatggaggtacagggtttattctggacaggagcactgggctgcatctgtgggttgggtccttttgggaaagggatggacacatggagctcctgccctggggtctgtgttgaatccccggtgaggattgcccagtagtagcccttgcttccacaactcaccatgccctctagaactttgccaaacaccacatgcttgccatctagccaggctgtcttgactgtcgtgatgaagaactgggagccgttggtgtctttgcctgcgttggccatgctcacccagccaggcccgtagtgcttcagtttgaagttctcatcggggaagcgctcaccgtagatgctctttcctgggaaaaaagacagagcaggtcaggggcgctggattgcgccaaaccaagcagacattcggggccaggactgagggggcttaacctgtcctctgtgccaggctaggctggagtggactacaaggacataaaagcagcgtccttcctatcttctggcctcagagccaagccatgctgactgaggccaagtggggcatcaggccaggctgatgtggtgaacagctcacagaaggattactttgagaagatagttttgtggcttttaaataaggcgcatgttatcagctccccttagctatggcccaggcctgccacggagggactttggtggagggaagtgccgtgcaggatgcaggggagtcaacagggtcggaactctccagaaaaggaggactgctgtggctgaccagcctgttttcctatgagcacaaaagacacaggcatagctgcagaggagaaagcagccagagatgtgtggggaggggcagaaaagaggggctgccccttggattctggagagtcaaagcctcttaacaaggaatgaacaggaataaaagacagctgtgagtgtg

SEQ ID NO: 465 - DNA, 482 bp, Homo sapiens
  ref <308>: DATABASE ACCESSION NUMBER: NCBI / NM_021103
  ref <309>: DATABASE ENTRY DATE: 2011-05-14
  ref <313>: RELEVANT RESIDUES IN SEQ ID NO: (1)..(482)
gcgggcgccgctcttttgtttcttgctgcagcaacgcgagtgggagcaccaggatctcgggctcggaacgagactgcacggattgttttaagaaaatggcagacaaaccagacatgggggaaatcgccagcttcgataaggccaagctgaagaaaacggagacgcaggagaagaacaccctgccgaccaaagagaccattgagcaggagaagcggagtgaaatttcctaagatcctggaggatttcctacccccgtcctcttcgagaccccagtcgtgatgtggaggaagagccacctgcaagatggacacgagccacaagctgcactgtgaacctgggcactccgcgccgatgccaccggcctgtgggtctctgaagggacccccccccaatcggactgccaaattctccggtttgccccgggatattatagaaaattatttgtatgaataatgaaaataaaacacacctcgtggcatggc

SEQ ID NO: 466 - DNA, 1247 bp, Homo sapiens
  ref <308>: DATABASE ACCESSION NUMBER: NCBI / NM_020195
  ref <309>: DATABASE ENTRY DATE: 2011-11-21
  ref <313>: RELEVANT RESIDUES IN SEQ ID NO: (1)..(1247)
actttacgcaggcgcgttaggtcctagtcgctatgcgtgtgcttgtgggtggcgggacaggcttcattgggacagccctaacccagctgctgaatgccagaggccacgaagtgacgttggtctcccgaaagcccgggcccggccggatcacgtgggatgagctcgctgcatcggggctgccgagctgcgatgccgccgtcaacctggccggagagaacatcctcaaccctctccgaagatggaatgaaaccttccaaaaagaggtaatcggcagccgcctagagaccacccaattgctggctaaagccatcaccaaagccccacaaccccccaaggcctgggtcttagtcacaggtgtagcttactaccagcccagtctgactgcggagtatgatgaagacagcccaggaggggactttgactttttctccaacctcgtaaccaaatgggaagctgcagccaggcttcctggagattctacacgccaggtggtggtgcgctcaggggttgtgctgggccgtgggggtggtgccatgggccacatgctgctgccctttcgcctgggcctggggggccccatcggctcaggccaccaattcttcccctggatacacatcggggacctggcaggaatcctgacccatgcccttgaagcaaaccacgtgcacggggtcctgaatggagtggctccatcctccgccactaatgctgagtttgcccagaccttgggtgctgccctgggccgccgagccttcatccctctccccagcgctgtggtgcaagctgtctttgggcgacagcgtgccatcatgctgctggagggccagaaggtgatcccacagcgaacactggccactggctaccagtattccttcccagagctaggggctgccttaaaggaaattgtagcctaagtaggtcgtggcaagggcctgaggcctgttcctcacaggcttccaggttaggcactgtgaataggctcagctcctctagagagctgaagccatctggttcttagattcctctcccagtcctctttcccattgttctgttgctccaccttattgtctcaaggccgtaatctcatcaggttgggacattaatcttttcaactccttgtaagatttcccagtttggtttctctacatgtcctgcagctgccccacttctcctttacgctgtgtagagaatgctctgcagtttaggcaataaaaataaattgtctcactaaaaaaaaaaaaaaaaaa

SEQ ID NO: 467 - DNA, 1884 bp, Homo sapiens
  ref <308>: DATABASE ACCESSION NUMBER: NCBI / NM_017432
  ref <309>: DATABASE ENTRY DATE: 2011-11-09
  ref <313>: RELEVANT RESIDUES IN SEQ ID NO: (1)..(1884)
agtggttcggccgcggcgaccccactccggcggcgcgtcccccgagcttggtacggctcagcccgtctcccccgaagccgcgcgcccgcgcccgcgcccctcagtcggtggagcccgcagccccccttgtggcccgcggcagctccccgcccgctcggcccgcgcccgccatggtccgtccgcgccgtgccccgtaccgctccggcgccgggggccccctcgggggtcgcggccgccctccgcggcccctcgtggtgcgcgccgtccgctcgcgctcctggcctgccagcccccgaggcccgcagcctccgcggatccgggcccgctcggcccctcccatggaaggtgctcgggtcttcggggcactgggtcccatcggtccctcctcacctgggctcaccctcgggggtctggccgtgagcgagcaccggctcagcaacaagctgctggcttggagcggcgtcctcgagtggcaggagaagcgcagaccctactctgactccactgcaaagctgaagcggaccctgccctgccaagcctacgtgaaccaaggcgagaacctggagaccgaccagtggccgcagaagctgatcatgcagctgatccctcagcagctgctgaccaccctgggccccctgttccggaactcccagttggcacagttccacttcaccaacagagactgcgactcgctcaaggggctctgccgcatcatgggcaacggcttcgcgggctgcatgctgttcccccacatctccccctgtgaggtgcgcgtgctcatgctcctgtactcgtccaagaagaagatcttcatgggcctcatcccctacgaccagagcggcttcgtcagtgccatccggcaggtcatcaccacccgcaagcaggcagtgggacctggtggtgtcaactcaggcccagtccagatcgtcaacaacaagtttctggcatggagtggtgtcatggagtggcaggagcccaggcctgagcccaacagtcggtccaagaggtggctgccatcccacgtctacgtgaaccagggggagatcctgaggaccgagcagtggccaaggaagctgtacatgcagctcatcccgcagcagctgctgaccaccctagtgccgctgttccggaactcgcgcctggtccagttccacttcaccaaggacctggagacactgaagagcctgtgccggatcatggacaatggcttcgccggctgcgtgcacttttcctacaaagcatcgtgtgagatccgcgtgcttatgctcctgtactcttcagagaagaaaatcttcattggcctcatcccccatgaccagggcaactttgtcaacggcatccggcgtgtcattgccaaccagcagcaggtcctgcagcggaacctggagcaggagcaacagcaacgagggatgggggggtagtggttaccccgggctgggcccctccaggagtcacagatgaggcccccgcagagactggtgagtggtgaccctgtcatgtacaggagggaccctggggcatgtggggggggtggggttgggaaagaagcagggcgaccttggccttggggagagcagagcagagggagaggcagcagtcccagcggtcctaggctgtcgggaaactgcagcccagcctcagggccatgggaggtggtatccaggcctgggtggggccaggcctctgctcacagggatgtggggtcagtgcttgggagcctgtggccagcagcccccactgcacccctgcccccaggtgacacgcttctgagcaggggcccctggggacttcaactgcccagcaacatggaggatggtgtcctgaggcctccaaggacggtccccacccctctacgtttccccaataaagccttttaaaaacctg

SEQ ID NO: 468 - DNA, 4153 bp, Homo sapiens
  ref <308>: DATABASE ACCESSION NUMBER: NCBI / NM_014901
  ref <309>: DATABASE ENTRY DATE: 2011-12-17
  ref <313>: RELEVANT RESIDUES IN SEQ ID NO: (1)..(4153)
gcggggcggggcccctgcgggcttgcagcgggctactgtttgccggagcctcccggcgcgcccccgcgagccccctcccgtctggcgcgcgaccccgccgcttcgaatgttgtgaatcaaatgtggggtttgttacattccgctgccgccgcggacagttcttaaagggccagccgccggctgccgcgcagacccagctgcgtcctgcgccgcctcccgctccctgagggcctgggccgagagagactgatcgcgcgtgggcctcgcgaggcagacgccgtcgggcggacaacaaagagagaggccccggaaggagccgggctgcccccggacccgggggtggggaggggagcacattgttccgcagggcgggagctcttaaaggatccagacaggcaccccccccctcccccgccccctgcccagtttggccgtcctagatcgggaacaaaggagtcaacgtgtggccgggcggccaaagggttgtgagtcccggcccagcccctccacccccctgcccccccgatgcgaccatgggctctggcagtgactaggtggccaccctccgcccccgtgggccagcggcgattctctgcgggacctggcagcaccccgggccagctctggggaagccctggcctcgagggccccctggccagcccgcctgcccgggatgagcgcttaccctcccagcagccgccgtcccgacctccacacctccccgtagaggagcgccgagcctcggctcctgccggcgggagcccccgaatgctgcacccagccacccagcagagcccgttcatggttgatctccacgagcaggtgcaccagggacctgtccctctgtcctacacggtcaccacagtgacgacccaaggcttccccttgcctacaggccagcacatccctggctgcagtgcccagcagctcccagcatgctccgtgatgttcagtgggcagcattaccccctctgctgcctcccgcccccgcttatccaggcgtgcaccatgcagcagctgcctgtgccctatcaggcctacccccacctcatctccagtgaccactacatcctgcaccccccaccaccggccccacccccccagcccacccacatggcgcccctggggcagtttgtgtctctgcagacccagcaccctcggatgcccctccagcggctcgacaacgacgtggacctgcgtggggaccagccctccctgggcagcttcacctactccacctctgcgcctggcccagccctttccccgtcggtgcccctgcactacctgccccacgatccgctgcaccaggagctgtcctttggtgtgccatattctcacatgatgccacggagactgagcacccagagataccgcctgcagcagccactgcccccgccgcccccacccccacccccaccaccctactaccccagcttcctgccctacttcctctcgatgctgccaatgtcaccaacagcaatggggcccaccatcagcctggacctggacgtggatgatgtggagatggagaactatgaggccctcctgaacctggccgagcggctgggagatgccaagccccggggtctcaccaaagcagacatagagcagctcccgtcgtaccgctttaacccggacagccatcagtcggagcagacgctgtgtgtggtctgcttcagtgacttcgaggcgcggcagctgctccgagtcctcccctgcaaccatgagttccacaccaagtgtgttgacaagtggttgaaggccaaccggacgtgtcccatctgccgggccgacgcctccgaggtgcccagggaggctgagtgaggccacgcagccgcctgcccgggagaaccctgcctgaagctctggaaacttgtgggtggggcccagggaggatggggagggagtggcccaggcctgccccttcgctcctgcctgcatttccagagctggtgccagggtcagcccagcgaggagtccctgcaataagcccctgcatttgccaagctccaaagactccctccctagtctgcctgcctgcccgcccgccacggagctgcctgagtgtccctgatcgggtctccctcctgtgcaccctcaggtccctccttttcctgctggcactgagtgccaggggtccgctccctcagtggggccggtggagatccttggccccaggatgggcagacagagcaccatcctgggtcagaaggtctcatgctctgaaatggcgtgccctctgcccaggtggcactgccaggtgcgtagacagacggtgtcacgagccatttcctgagccccagggctgaatcccccctccttgaccccgaacagtgaactcaggcagctggctctgtgttggctgctgtgagggctgagtctggttccctaggggaccctcatcccaggaacaacattccagccccaccctcaggctggagggcgtcccagcctaatcccgagctggggcacacgtatcctgaggggcttgggccatacggggagagggagccctgtgttcccggtggttgtccctcccagggatgcagccagacccgtgcccaatctcctctccctctgttgttttgcatgaacgtgaggagcagcagtttttgttcattcatttggcccaaaatcacgtgtaggatttggggatgtggatatttaagacaatttcttttttcttttggtttaataggggcgggtatagggaccaactgggaccgagtgcccagggggccgagcacggtcatgctggccggcctgcatgcatgcgtgtgccgggctgggctgggcggccggcggtcgtggggcagggttgggggtctgtgctcagctgataactgccatgcactgtactgcacacgtccctagagcctaccgggacccgacgcttttcagggcatttctccctccagccagggcccaactcccacctgcctgggcgaatctcctccaaggaagtcccaggaggatggggaccaggaaggctgtggacccccatctccagggggccttcccagcctgatccctgtcctccaagttctggaggaggccgctgtagggtctggctgagcttcccacccactttccctggtcccaatcctttcttgtcctatacccagctggggttgctgccctgaacgaactgcgtgtggggccggcacatcctagcaggcagcccctggcgcctgctgcctcagggatgctccaaccaccctcgttctcctcgcagtggccctggctcccacctcccgccccagcctgccgtggggcccgtcagcctggtcccacccccatggagaacccaaagtcttactgtatataactccaggtgacgtttctatatttatagcagtgttgaaaacccacgtgttttacacagaaccaccctctccaacccctcccttcccgaccccaacaaaacgttttcaaaccccttacagttcctggggcaggcggaaacaggctcacagattgtgtgtcggctgcagcagtgattccaacaagcagctattgggggggaaacacagcatttaaaaagatcatcattaaaaaacaagatttatacaacaattacttaggatgtttgtgatctgccgaccttgctatagatgccatgttaccaatgatttcctgtggtgggggcttgccattgtttactctcttatttaccaacttctggcctaggcatgacagtgggcaccttcccccagccctggctgggcccagcgcctgtgttctgtgttagaaaggttttatatatatataaaattacatatatatgtagaaatatatgtaattttgggggccctgttccttgcacattttacagttacctcatttttcccatgtatgtatttgagaaaatgctaatatatagagaaaaaaatggttcttaaagcttaaatgtgtggttttttccattccatgggattcacattggtttgtagcatttaacataactagtatgttgtattatatatatgtgtatactgattgaaatttttaacagatttgtactttttttaaaatgaaagttgctagttctgcttgaccaagtagtgcaatcattattttttttaatattgttgctgatttcagagggatattcactaataaatgtatgatgtataccaacgaccgcccacgc

SEQ ID NO: 469 - DNA, 3740 bp, Homo sapiens
  ref <308>: DATABASE ACCESSION NUMBER: NCBI / NM_014694
  ref <309>: DATABASE ENTRY DATE: 2011-10-22
  ref <313>: RELEVANT RESIDUES IN SEQ ID NO: (1)..(3740)
cgccgtctgccctccgcagcgctcgcccctttctctgggaggacaacctgctgacccgaagccagggtctgccagacaaccacgaccaactagtcccagataaccttgaggcctgggcactggctgggccccgagggctcttcccaaagcgtaccctggtcatctggaagaggatcggagctggcctggtggtgacagtggccttgcttcctaggatggatggcagatggcaatgttcctgctgggcctggttcctgctggttctggcagttgtagctggggacacagtgtcaaccgggtccacggacaacagcccaacatccaatagcctggaggggggcaccgacgccacggccttctggtggggggagtggaccaagtggacggcgtgttcccgcagttgcgggggtggggtgacatcccaggagcggcactgcctgcagcagaggaggaagtccgtcccgggccccgggaacaggacctgcacgggcacgtccaagcggtaccagctctgcagagtgcaggagtgtccgccggacgggaggagcttccgcgaggagcagtgcgtctccttcaactcccacgtgtacaacgggcggacgcaccagtggaagcctctgtacccggatgactatgtccacatctccagcaaaccgtgtgacctgcactgtaccaccgtggacggccagcggcagctcatggtccccgcccgcgacggcacatcctgcaagctcactgacctgcgaggggtttgcgtgtctggaaaatgtgagcccatcggctgtgacggggtgcttttctccacccacacactggacaagtgtggcatctgccagggggacggtagcagctgcacccacgtgacgggcaactatcgcaaggggaatgcccaccttggttactctctggtgacccacatcccggctggtgcccgagacatccagattgtagagaggaagaagtccgctgacgtgctagctcttgcagacgaagctggctactacttcttcaacggcaactacaaggtggacagccccaagaacttcaacatcgcaggcacggtggtcaagtacaggcggcccatggatgtctatgagaccggaatcgagtacatcgtggcacaggggcccaccaaccagggcctgaatgtcatggtgtggaaccagaacggcaaaagcccctccatcaccttcgagtacacgctgctgcagccgccacacgagagccgcccccagcccatctactatggcttctccgagagcgctgagagccagggcctggacggggccgggctgatgggcttcgtcccgcacaacggctccctctacggccaggcctcctcagagcggctgggcctggacaaccggctgttcggccacccgggcctggacatggagctgggccccagccagggccaggagaccaacgaggtgtgcgagcaggccggcggcggggcctgcgaggggccccccaggggcaagggcttccgagaccgcaacgtcacggggactcctctcaccggggacaaggatgacgaagaggttgacacccacttcgcctcccaggagttcttctcggctaacgccatctctgaccagctgctgggcgcaggctctgacttgaaggacttcaccctcaatgagactgtgaacagcatctttgcacagggcgccccaaggagctccctggccgagagcttcttcgtggattatgaggagaacgagggggctggcccttacctgctcaacgggtcctacctggagctgagcagcgacagggttgccaacagctcctccgaggccccattccccaacgttagcaccagcctgctcacctcggccgggaacaggactcacaaggccaggaccaggcccaaggcgcgcaagcaaggcgtgagtcccgcggacatgtaccggtggaagctctcgtcccacgagccctgcagtgccacctgcaccacaggggtcatgtctgcgtacgccatgtgtgtccgctatgatggcgtcgaggtggatgacagctactgtgacgccctgacccgtcccgagcctgtccacgagttctgcgctgggagggagtgccagcccaggtgggagacgagcagctggagcgagtgttcgcgcacctgcggagagggctaccagttccgcgtcgtgcgctgctggaagatgctctcgcccggcttcgacagctccgtgtacagcgacctgtgcgaggcagccgaggccgtgcggcccgaggaacgcaagacctgccggaaccccgcctgcgggccccagtgggagatgtcggagtggtccgagtgcactgccaagtgtggggagcgcagtgtggtgaccagggacatccgctgctcggaggatgagaagctgtgtgaccccaacaccaggcctgtaggggagaagaactgcacgggcccgccctgtgaccggcagtggaccgtctccgactggggaccgtgcagtggaagctgcgggcaaggccgcaccatcaggcacgtgtactgcaagaccagcgacggacgggtagtacctgagtcccagtgccagatggagaccaagcctctggccatccacccctgtggggacaaaaactgtcccgcccactggctggcccaggactgggagcggtgcaacaccacctgcgggcgcggggtcaagaagcggctggtgctctgcatggagctggccaacgggaagccgcagacgcgcagtggccccgagtgcgggctcgccaagaagcctcccgaggagagcacgtgtttcgagaggccctgcttcaagtggtacaccagcccctggtcagagtgcaccaagacctgcggggtgggcgtgaggatgcgagacgtcaagtgctaccaggggaccgacatcgtccgtggttgcgatccgttggtgaagcccgttggcagacaggcctgtgatctgcagccctgccccacggagcccccagatgacagctgccaggaccagccaggcaccaactgtgccctggccatcaaagtgaacctctgcgggcactggtactacagcaaggcgtgctgccgctcctgcaggcccccccactcctaggcccggcagctgcagccccttccagatgaagaccaagcgcccctcctggggctgctgcagcttctggggcctccacagacccccctcctgcggggcacgctggcctaagagacgtggcactgagcctcggctgtcgagaggggacttcccacggcccgtggacctttgtgctcctggggcagagcctccggcacccagtggcctcccccagacagagccacccctgccgtgggaacctgtccgtgttcctgcgtggatcctgtgtttgtggctcccactccccagccccccagcagcccccagccgaggggcccagggcccacagccagcggtggaggtgtcttgctccgggcccgtagcccacgccctctctgggtggcagggccttctgaaggaaacttgcaggcgagcccaacgtggtggggggccttcctccctcagaggccatggggtgagaggggctcaggcagccaaggaggcccaggcgtgctccctcttatggagcccctcccatggagctctcttcccgccgcactttctaccccgggcagaggcgcttgcccacgggacgtttggggatggacctcggcccccgcccctgcagtcagcgtcagtgctcatctacgttaataaagtggtcctatttatggcggcaaaaaaaaaaaaaaa

SEQ ID NO: 470 - DNA, 1381 bp, Homo sapiens
  ref <308>: DATABASE ACCESSION NUMBER: NCBI / NM_007369
  ref <309>: DATABASE ENTRY DATE: 2008-02-10
  ref <313>: RELEVANT RESIDUES IN SEQ ID NO: (1)..(1381)
gccttatctttccagtcgtccagcatgctctgcccaccccacgccgaggtgcactgaccatgagcctcaactcctccctcagctgcaggaaggagctgagtaatctcactgaggaggagggtggcgaagggggcgtcatcatcacccagttcatcgccatcattgtcatcaccatttttgtctgcctgggaaacctggtcatcgtggtcaccttgtacaagaagtcctacctcctcaccctcagcaacaagttcgtcttcagcctgactctgtccaacttcctgctgtccgtgttggtgctgccttttgtggtgacgagctccatccgcagggaatggatctttggtgtagtgtggtgcaacttctctgccctcctctacctgctgatcagctctgccagcatgctaaccctcggggtcattgccatcgaccgctactatgctgtcctgtaccccatggtgtaccccatgaagatcacagggaaccgggctgtgatggcacttgtctacatctggcttcactcgctcatcggctgcctgccacccctgtttggttggtcatccgtggagtttgacgagttcaaatggatgtgtgtggctgcttggcaccgggagcctggctacacggccttctggcagatctggtgtgccctcttcccctttctggtcatgctggtgtgctatggcttcatcttccgcgtggccagggtcaaggcacgcaaggtgcactgtggcacagtcgtcatcgtggaggaggatgctcagaggaccgggaggaagaactccagcacctccacctcctcttcaggcagcaggaggaatgcctttcagggtgtggtctactcggccaaccagtgcaaagccctcatcaccatcctggtggtcctcggtgccttcatggtcacctggggcccctacatggttgtcatcgcctctgaggccctctgggggaaaagctccgtctccccgagcctggagacttgggccacatggctgtcctttgccagcgctgtctgccaccccctgatctatggactctggaacaagacagttcgcaaagaactactgggcatgtgctttggggaccggtattatcgggaaccatttgtgcaacgacagaggacttccaggctcttcagcatttccaacaggatcacagacctgggcctgtccccacacctcactgcgctcatggcaggtggacagcccctggggcacagcagcagcacgggggacactggcttcagctgctcccaggactcaggtaacctgcgtgctttataagcctctcacctgtcgcgttttccctgtgttgcgtttcccccgtgtcgcgtttcccctgtgcaggctcaagagctggcggaggggcatttcccacggtg

SEQ ID NO: 471 - DNA, 625 bp, Homo sapiens
  ref <308>: DATABASE ACCESSION NUMBER: NCBI / NM_006156
  ref <309>: DATABASE ENTRY DATE: 2011-12-18
  ref <313>: RELEVANT RESIDUES IN SEQ ID NO: (1)..(625)
agtagaagtggcccttgcaggcaagagtgctggagggcggcagcggcgaccggagcggtaggagcagcaatttatccgtgtgcagccccaaactggaaagaagatgctaattaaagtgaagacgctgaccggaaaggagattgagattgacattgaacctacagacaaggtggagcgaatcaaggagcgtgtggaggagaaagagggaatccccccacaacagcagaggctcatctacagtggcaagcagatgaatgatgagaagacagcagctgattacaagattttaggtggttcagtccttcacctggtgttggctctgagaggaggaggtggtcttaggcagtgatggaccctccattttacctctttaccctgtcgctcataatgaggcatcatatatcctctcactctctgggacaccatagccactgccccctcccctggatgcccagtaatgtatgtctactggtgggagactgtgaggatcccaggattcagtattcctggcccagagggcccttgctggctactgggtgttagtttgcagtcctgtgtgcttccctctcttatgactgtgtccctggttgtcaataaaatatttcctggcctcctggaatctttc

SEQ ID NO: 472 - DNA, 1948 bp, Homo sapiens
  ref <308>: DATABASE ACCESSION NUMBER: NCBI / NM_006429
  ref <309>: DATABASE ENTRY DATE: 2011-11-27
  ref <313>: RELEVANT RESIDUES IN SEQ ID NO: (1)..(1948)
atagagtagcggaagtggtccgttctcttcctctcccggcccaagcttctgggtatttctattgcgcgaggcattgtgggttgctgggcggcccggtctcggagaagaggggagagtggcgggccgctgaataagcttccaaaatgatgcccacaccagttatcctattgaaagaggggactgatagctcccaaggcatcccccagcttgtgagtaacatcagtgcctgccaggtgattgctgaggctgtaagaactaccctgggtccccgtggcatggacaagcttattgtagatggcagaggcaaagcaacaatttctaatgatggggccacaattctgaaacttcttgatgttgtccatcctgcagcaaagactttggtagacattgccaaatcccaagatgctgaggtgggtgatggcaccacctcagtgaccttgctggctgcagagtttctgaagcaggtgaaaccctatgtggaggaaggtttacacccccagatcatcattcgagctttccgcacagccacccagctggcagttaacaagatcaaagagattgctgtgaccgtgaagaaggcagataaagtggagcagaggaagctgctggaaaagtgtgccatgaccgctctgagctccaagctgatctcccagcagaaagctttctttgctaagatggtggtggatgcagtgatgatgctcgatgatttgctgcagcttaaaatgattggaatcaagaaggtacagggtggagccctcgaggattctcagctggtagctggtgttgcattcaagaagactttctcttacgctgggtttgaaatgcaacccaaaaagtaccacaatcccaagattgcccttttgaatgtcgagctcgagttgaaagctgagaaagacaatgctgagataagagtccacacagttgaggattatcaggcaattgttgatgctgagtggaacattctctatgacaagttagagaagatccatcattctggagccaaagttgtcttgtccaaactccccattggggatgtggccacccagtactttgctgacagggacatgttctgtgctggccgagtacctgaggaggatctgaagaggacaatgatggcctgtggaggctcaatccagaccagtgtgaatgctctgtcagcagatgtgctgggtcgatgccaggtgtttgaagagacccagattggaggcgagaggtacaatttttttactggctgccccaaggccaagacatgcaccttcattctccgtggcggcgccgagcagtttatggaggagacagagcggtccctgcatgatgccatcatgatcgtcaggagggccatcaagaatgattcagtggtggctggtggcggggccattgagatggaactctccaagtacctgcgggattactcaaggactattccaggaaaacagcagctgttgattggggcatatgccaaggccttggagattatcccacgccagctgtgtgacaatgctggctttgatgccacaaacattctcaacaagctgcgggctcggcatgcccaggggggtacatggtatggagtagacatcaacaacgaggacattgctgacaactttgaagctttcgtgtgggagccagctatggtgcggatcaatgcgctgacagcagcctctgaggctgcgtgcctgatcgtgtctgtagatgaaaccatcaagaacccccgctcgactgtggatgctcccacagcagcaggccggggccgtggtcgtggccgcccccactgagaggcaccccacccatcacatggctggctggctgctgggtgcacttaccctccttggcttggttacttcattttacaaggaaggggtagtaattggcccactctcttcttactggaggctatttaaataaaatgtaagacttcagataactttgtaaattaaaaaaaaaaaaa

SEQ ID NO: 473 - DNA, 1956 bp, Homo sapiens
  ref <308>: DATABASE ACCESSION NUMBER: NCBI / NM_006513
  ref <309>: DATABASE ENTRY DATE: 2011-11-28
  ref <313>: RELEVANT RESIDUES IN SEQ ID NO: (1)..(1956)
aggaagggcgggtcagcgcgccggcgcagtgcggcggtcacaggctgagtgctgcggcgcgatccttgcttccctgagcgttggcccgggaggaaagaagatggtgctggatctggatttgtttcgggtggataaaggaggggacccagccctcatccgagagacgcaggagaagcgcttcaaggacccgggactagtggaccagctggtgaaggcagacagcgagtggcgacgatgtagatttcgggcagacaacttgaacaagctgaagaacctatgcagcaagacaatcggagagaaaatgaagaaaaaagagccagtgggagatgatgagtctgtcccagagaatgtgctgagtttcgatgaccttactgcagacgctttagctaacctgaaagtctcacaaatcaaaaaagtccgactcctcattgatgaagccatcctgaagtgtgacgcggagcggataaagttggaagcagagcggtttgagaacctccgagagattgggaaccttctgcacccttctgtacccatcagtaacgatgaggatgtggacaacaaagtagagaggatttggggtgattgtacagtcaggaagaagtactctcatgtggacctggtggtgatggtagatggctttgaaggcgaaaagggggccgtggtggctgggagtcgagggtacttcttgaagggggtcctggtgttcctggaacaggctctcatccagtatgcccttcgcaccttgggaagtcggggctacattcccatttataccccctttttcatgaggaaggaggtcatgcaggaggtggcacagctcagccagtttgatgaagaactttataaggtgattggcaaaggcagtgaaaagtctgatgacaactcctatgatgagaagtacctgattgccacctcagagcagcccattgctgccctgcaccgggatgagtggctccggccggaggacctgcccatcaagtatgctggcctgtctacctgcttccgtcaggaggtgggctcccatggccgtgacacccgtggcatcttccgagtccatcagtttgagaagattgaacagtttgtgtactcatcaccccatgacaacaagtcatgggagatgtttgaagagatgattaccaccgcagaggagttctaccagtccctggggattccttaccacattgtgaatattgtctcaggttctttgaatcatgctgccagtaagaagcttgacctggaggcctggtttccgggctcaggagccttccgtgagttggtctcctgttctaattgcacggattaccaggctcgccggcttcgaatccgatatgggcaaaccaagaagatgatggacaaggtggagtttgtccatatgctcaatgctaccatgtgcgccactacccgtaccatctgcgccatcctggagaactaccagacagagaagggcatcactgtgcctgagaaattgaaggagttcatgccgccaggactgcaagaactgatcccctttgtgaagcctgcgcccattgagcaggagccatcaaagaagcagaagaagcaacatgagggcagcaaaaagaaagcagcagcaagagacgtcaccctagaaaacaggctgcagaacatggaggtcaccgatgcttgaacattcctgcctccctatttgccaggctttcatttctgtctgctgagatctcagagcctgcccaacagcagggaagccaagcacccattcatccccctgcccccatctgactgcgtagctgagaggggaacagtgccatgtaccacacagatgttcctgtctcctcgcatgggcatagggacccatcattgatgactgatgaaaccatgtaataaagcatctctggggagggcttaggactcttcctcagtcttcttccccgggcttgaaccccgcctctgaggttctccctgaaaaaaaaaaaaaaaaaa

SEQ ID NO: 474 - DNA, 847 bp, Homo sapiens
  ref <308>: DATABASE ACCESSION NUMBER: NCBI / NM_005022
  ref <309>: DATABASE ENTRY DATE: 2011-11-20
  ref <313>: RELEVANT RESIDUES IN SEQ ID NO: (1)..(847)
acagcgagcggagccgcggtccggacggcagcgcgtgccccgagctctccgcctccccccgcccgccagccgaggcagctcgagcccagtccgcggccccagcagcagcgccgagagcagccccagtagcagcgccatggccgggtggaacgcctacatcgacaacctcatggcggacgggacctgtcaggacgcggccatcgtgggctacaaggactcgccctccgtctgggccgccgtccccgggaaaacgttcgtcaacatcacgccagctgaggtgggtgtcctggttggcaaagaccggtcaagtttttacgtgaatgggctgacacttgggggccagaaatgttcggtgatccgggactcactgctgcaggatggggaatttagcatggatcttcgtaccaagagcaccggtggggcccccaccttcaatgtcactgtcaccaagactgacaagacgctagtcctgctgatgggcaaagaaggtgtccacggtggtttgatcaacaagaaatgttatgaaatggcctcccaccttcggcgttcccagtactgacctcgtctgtcccttccccttcaccgctccccacagctttgcacccctttcctccccatacacacacaaaccattttattttttgggccattaccccataccccttattgctgccaaaaccacatgggctgggggccagggctggatggacagacacctccccctacccatatccctcccgtgtgtggttggaaaacttttgttttttggggttttttttttctgaataaaaaagattctactaacaaaaaaaaaaaaaaaaaaaaaaaaaaaaaaaaaaaaaaaaaa

SEQ ID NO: 475 - DNA, 5121 bp, Homo sapiens
  ref <308>: DATABASE ACCESSION NUMBER: NCBI / NM_014654
  ref <309>: DATABASE ENTRY DATE: 2011-11-11
  ref <313>: RELEVANT RESIDUES IN SEQ ID NO: (1)..(5121)
acaaaggcgcccgcccgccgcccgccgcccgcgcccgcgccgccgccatgaagccggggccgccgcaccgtgccggggccgcccacggggccggcgccggggccggggccgcggccgggcccggggcccgcgggctgctcctgccaccgctgctgctgctgctgctggcggggcgcgccgcgggggcccagcgctggcgcagtgagaacttcgagagacccgtggacctggagggctctggggatgatgactcctttcccgatgatgaactggatgacctctactcggggtcgggctcgggctacttcgagcaggagtcgggcattgagacagccatgcgcttcagcccagatgtagccctggcggtgtccaccacacctgcggtgctgcccaccacgaacatccagcctgtgggcacaccatttgaagagctcccctctgagcgccccaccctggagccagccaccagccccctggtggtgacagaagtcccggaagagcccagccagagagccaccaccgtctccactaccatggctaccactgctgccacaagcacaggggacccgactgtggccacagtgcctgccacagtggccaccgccacccccagcacccctgcagcacccccttttacggccaccactgctgttataaggaccactggcgtacggaggcttctgcctctcccactgaccacagtggctacggcacgggccactacccccgaggcgccctccccgcccaccacggcggctgtcttggacaccgaggccccaacacccaggctggtcagcacagctacctcccggccaagagcccttcccaggccggccaccacccaggagcctgacatccctgagaggagcaccctgcccctggggaccactgcccctggacccacagaggtggctcagaccccaactccagagaccttcctgaccacaatccgggatgagccagaggttccggtgagtggggggcccagtggagacttcgagctgccagaagaagagaccacacaaccagacacagccaatgaggtggtagctgtgggaggggctgcggccaaggcatcatctccacctgggacactgcccaagggtgcccgcccgggccctggcctcctggacaatgccatcgactcgggcagctcagctgctcagctgcctcagaagagtatcctggagcggaaggaggtgctcgtagctgtgattgtgggcggggtggtgggcgccctctttgctgccttcttggtcacactgctcatctatcgtatgaagaaaaaggatgagggcagctacacgctggaggaacccaagcaggcgagcgtcacataccagaagcctgacaagcaggaggagttctatgcctagtggagccacagtgcctccctgcagcctcaacaccaccctgctgtccagtccccagcctggccccaccagcccaagcctgggactgggcctggaacctggccccagttcttctctgccctctctcccaaggtctgcccaggctgccagcctcacacagatcttccccgaggaagaggggctgctgccatctgccccagactgtgcccttacgagctcatctcttgttcccctcatccctgccaccagtctggggcttcaggacctcatgtcagatggatgggaggaagaaagctcctgattggctggtggtggaagaaagggtggggcttgagatgagcctgagccctgacttggcacccacagtgctcactgagatctcctttttggggcagagaggcactcaggctggtttccaggacaaacatttggtaaacacagcccttgaaatcatctagacactgcaacctcttgctcgtatcccagggcctctctctagctgggtgagagggtgtcccttgtcaccagcctgttttgtcctggtctctctggggttgttgaatctctcctcttgcctgccaagtacacatgtacccagacttcatttctttctgcatcttcccccaagaaacagcttcctgagggtgctggggcagccactggtgaggaggggctgctctgatgtccctcctatgaggggactctgcacagacaccattgcccacactatcaccatattttcactcagtcacacacaagacaaaagcatgcaatgacaaaaccatacgcaatcctgaccgcccagccaatcaagacatatcacagaacacacgcgtccttccaagaatgtttatcctcatgcatcacttacacacccccagacacgtactgcaatgcaagtcactagtcatggtcacatgacagtgacagtgtggcctcctcctaccccaaatacacccacactctggcaccacacacattgtctccagctttcaggcttactggggagggtggaatcgagccagaacaatcagcccatattgggtccccctaagttgccccgtcatactcagtcccatgccatggtgcccacaccaaccatgcagccgccaaccccagccagtgtcagacacaatcccatgtggatgcacagtctcactccacatgacctgctctcaatgctggagggaaacaggcaggcccttgcctttctcggaaaaagtgtggggccacagcccttttagggcattgcatgcaggtgggcctggcttcacccctacctgcttcctccccaccgcagctggcagagggggaggtttggggccagacccccactagctgggagcctgggggctcctctaaggctgaggaaggaaatttggccccaggttgttggggggtcttgggtctcccaggacggaaggcccagggcagggagggggcatgtggttgggctcctttatctccctgtgtccccttcctgctttgagctagggggctgactctgcctcccaggacacaagtctccaaagtgcctgtgagggcgggccctccgcaccctctgccctctgcctggcaggccaacctcagcccacctgcccagaggccctccctgtggacaccccctcacctatttggccaaacaattctggctgcagcttcaggggccatggctggaagcagcccctgcagatccctcaggccccgaggtcagggtttgagggatgagaccaggtgatagtgggggaggggttacttcctttgttacctagcaagtagggctatttccatcggtattttaaatgtggggtcacagatcttttggggagggtgtgcttggcagggggcctcttggagccaaagggatgtggtgtgagttgcgattggctggcactcacacccccacccctcacccacatcccagattcaagtcaggaaggcaggttttatttcagggcccttttcaagatgccctggcagcagatttctgcaggatgaggggtagcggtgtgtaggcagtgagggggaggttccaggggctgtcccacagcctgtcttttccaggctgggctccatcttccagtcccaaaaccctccttcacagggcccagaggcttgtgaggaagccaggtggacccagccttagaagagtgggcatggggggcccctgatatctggagggggcgggttggcctcagtcatctttggagcagaagggctgggtcctggggccacagaccacaaggctcagcctccctaccctgctccctggggtgctgctgtcttggagagcacagctctggtgagacggcctgggcaggccgaggctgagaaaccagggaggatagaggagaaaagggcttgggcccccagccccagaagatgctggaccccaggtgggagacccaacagtgggtgcagtttctcagtagggctggagccaatggtgggggtggccccggcaggcctggctcctcacatcccaggggttggcttctgatttggggcttgggctccaggcactggcttctcttctctgtgtccttagcatttgagagaagaggccaggggccttgttcatggatccctggacccaaggcagatgtccaggctttatcctcctgaggatgaggagtctgaccagcccaaatctgccctggccggcctgaccggggcaaggcagtccaagagagttcagtgaggaccagctaggctctcccaggtgcaatgtgggtgcagggccctcatgtccccctacccctgcctgtgatggagtgttctgaggggctttggcatttgctggaagcacagggagttccaaatgagagggagcttctgtggcttgagagcctctggggccttggctgccagagcacgaggcaggccaggacctggagagcccagaccctgtctccaggaggccaggaggccagatgggggccttgcctgaaagactggtccccttgatcgctggaggcatgtgggtggcaaccagggctgggcagggcttagggtgtgtgggccaaacccccctggggttggcaaagccgcctgtcaggcctcctggtgggggcccctggacacagggagcagaccctctgcctcatggggtaggagtggctgcctcctgtgttctctggatttcttctcccaacaactacaaccctggacttgcctccccaggcctcttgcctgtaaatagaagcccgcaaactgtacagatttacagaggcatcgagactgggccctgggagttgccatctgagagccgatggccccagcatcccccaggtgcctgcctggcaccacagtgaccctggcctcagcgtggcaaatgcatgtaaatatttttcgtaggcagcgtggctccagagagccccctgaagacagtgtccctccctcctgtgagtcctttctcctgtacagaacctgcctggggtgggtgggggtctgccattccctcccccaggccttccctgccccttctctcccctgtaacctgtttattaaccatacctgtcctgagttcatggccaaaaccttaaataagaaaaacaaaagaaaaagacagtggaaaaaagagaccaaggcgcctgccccactgcgggtactctcctgttccagccttgtgaaggaactggttttgtttttgtttttttttttttttttttttttttgtttgtttgtttttttaacacttcctgtgctgtgcccatttataagaggaaataaaattaagctgaaatga

SEQ ID NO: 476 - DNA, 475 bp, Homo sapiens
  ref <308>: DATABASE ACCESSION NUMBER: NCBI / NM_007209
  ref <309>: DATABASE ENTRY DATE: 2011-08-14
  ref <313>: RELEVANT RESIDUES IN SEQ ID NO: (1)..(475)
cttcctctttccctcggagcgggcggcggcgttggcggcttgtgcagcaatggccaagatcaaggctcgagatcttcgcgggaagaagaaggaggagctgctgaaacagctggacgacctgaaggtggagctgtcccagctgcgcgtcgccaaagtgacaggcggtgcggcctccaagctctctaagatccgagtcgtccggaaatccattgcccgtgttctcacagttattaaccagactcagaaagaaaacctcaggaaattctacaagggcaagaagtacaagcccctggacctgcggcctaagaagacacgtgccatgcgccgccggctcaacaagcacgaggagaacctgaagaccaagaagcagcagcggaaggagcggctgtacccgctgcggaagtacgcggtcaaggcctgaggggcgcattgtcaataaagcacagctggctgagactgcaaaaaaaaaaaaaaa

SEQ ID NO: 477 - DNA, 1771 bp, Homo sapiens
  ref <308>: DATABASE ACCESSION NUMBER: NCBI / NM_006082
  ref <309>: DATABASE ENTRY DATE: 2011-11-20
  ref <313>: RELEVANT RESIDUES IN SEQ ID NO: (1)..(1771)
ggcggccaggccgggcgcggagtgggcgcgcggggccggaggaggggccagcgaccgcggcaccgcctgtgcccgcccgcccctccgcagccgctacttaagaggctccagcgccggccccgccctagtgcgttacttacctcgactcttagcttgtcggggacggtaaccgggacccggtgtctgctcctgtcgccttcgcctcctaatccctagccactatgcgtgagtgcatctccatccacgttggccaggctggtgtccagattggcaatgcctgctgggagctctactgcctggaacacggcatccagcccgatggccagatgccaagtgacaagaccattgggggaggagatgactccttcaacaccttcttcagtgagacgggcgctggcaagcacgtgccccgggctgtgtttgtagacttggaacccacagtcattgatgaagttcgcactggcacctaccgccagctcttccaccctgagcagctcatcacaggcaaggaagatgctgccaataactatgcccgagggcactacaccattggcaaggagatcattgaccttgtgttggaccgaattcgcaagctggctgaccagtgcaccggtcttcagggcttcttggttttccacagctttggtgggggaactggttctgggttcacctccctgctcatggaacgtctctcagttgattatggcaagaagtccaagctggagttctccatttacccagcaccccaggtttccacagctgtagttgagccctacaactccatcctcaccacccacaccaccctggagcactctgattgtgccttcatggtagacaatgaggccatctatgacatctgtcgtagaaacctcgatatcgagcgcccaacctacactaaccttaaccgccttattagccagattgtgtcctccatcactgcttccctgagatttgatggagccctgaatgttgacctgacagaattccagaccaacctggtgccctacccccgcatccacttccctctggccacatatgcccctgtcatctctgctgagaaagcctaccatgaacagctttctgtagcagagatcaccaatgcttgctttgagccagccaaccagatggtgaaatgtgaccctcgccatggtaaatacatggcttgctgcctgttgtaccgtggtgacgtggttcccaaagatgtcaatgctgccattgccaccatcaaaaccaagcgcagcatccagtttgtggattggtgccccactggcttcaaggttggcatcaactaccagcctcccactgtggtgcctggtggagacctggccaaggtacagagagctgtgtgcatgctgagcaacaccacagccattgctgaggcctgggctcgcctggaccacaagtttgacctgatgtatgccaagcgtgcctttgttcactggtacgtgggtgaggggatggaggaaggcgagttttcagaggcccgtgaagatatggctgcccttgagaaggattatgaggaggttggtgtggattctgttgaaggagagggtgaggaagaaggagaggaatactaattatccattccttttggccctgcagcatgtcatgctcccagaatttcagcttcagcttaactgacagacgttaaagctttctggttagattgttttcacttggtgatcatgtcttttccatgtgtacctgtaatatttttccatcatatctcaaagtaaagtcattaacatcaaaaaaaaaaaaaaaaaaaaaa

SEQ ID NO: 478 - DNA, 2346 bp, Homo sapiens
  ref <308>: DATABASE ACCESSION NUMBER: NCBI / NM_006362
  ref <309>: DATABASE ENTRY DATE: 2011-11-13
  ref <313>: RELEVANT RESIDUES IN SEQ ID NO: (1)..(2346)
cggcgcgcgacgtgctttgctgtataaatgcggtggcgcccggcgtagggacacttcggtcctgagcgcttgggagttaggttgtttgccggcgtagcggccagcgcctgagcccgcccttgatcttcgctgtggcatggcggacgaggggaagtcgtacagcgaacacgatgatgaacgcgttaatttccctcaaagaaagaagaaaggccggggtcccttccggtggaaatatggtgaaggaaaccgtaggtctggaagaggcggttctggtattcggtcttcccgccttgaggaagatgatggagatgtggcaatgagtgatgcccaggatggtccccgagtacgatacaacccctataccacccgacctaaccgtcggggtgatacttggcatgatcgagatcgcattcatgttactgtgcggagagacagagctcctccagagagaggaggggctggcaccagccaggatgggacctcaaagaactggttcaagattacaattccttatggcagaaagtatgacaaggcatggctcctgagcatgattcagagcaagtgcagtgtgcccttcacccctattgagtttcactatgagaatacacgggcccagttcttcgttgaagacgccagtactgcctctgcattgaaggctgtcaactataagattttggatcgggagaaccgaaggatatctatcatcatcaactcttctgctccaccccacactatactgaatgaactgaagccagaacaagtagaacagctaaagctgatcatgagcaaacgatacgatggctcccaacaagcccttgacctcaaaggcctccgttcagacccagatttggtggcccagaacattgacgttgtcctgaatcgcagaagctgtatggcagctaccctgaggatcattgaagagaacatccctgagctattgtccttgaacttgagcaacaacaggctgtacaggctggatgacatgtctagcattgttcagaaggcacccaacctgaagatcctaaacctttctggaaatgaattgaagtctgagcgggaattggacaagataaaggggctgaagctagaagagctctggctcgatggaaactccctgtgtgacaccttccgagaccagtccacctacatcagcgccattcgcgaacgatttcccaagttactacgcctggatggccatgagctacccccaccaattgcctttgatgttgaagcccccacgacgttaccgccctgcaagggaagctattttggaacagaaaacttgaagagtctggtcttgcacttcctgcaacagtactatgcaatttacgactctggagaccgacaagggctcctggatgcctaccatgatggggcctgctgttccctgagcattcctttcattcctcagaaccctgcccgaagcagcttagccgagtatttcaaggatagcagaaatgtgaagaagcttaaagaccctaccttgcggttccggctgctgaagcacacgcgtctcaacgttgttgccttcctcaatgagttgcccaaaacccagcacgacgtcaattccttcgtggtagacataagcgcccagacaagcacattgctgtgtttttctgtcaatggagtcttcaaggaagtggacggaaagtcccgggattctttgcgagccttcacccggacattcattgctgttcctgctagcaattcagggctatgtattgtaaatgatgagctatttgtgcggaatgccagttctgaagagatccaaagagccttcgctatgcctgcacccacgccttcctccagcccggtgcccaccctctctccagagcagcaggaaatgttgcaagcattctctacccagtctggcatgaacctcgagtggtcccagaagtgccttcaggacaacaactgggactacaccagatctgcccaggccttcactcatctcaaggccaagggcgagatcccagaagtggcattcatgaagtgatcgtagtcatgcctcagaagcagtcccccctgtaaatagtccttggatattaccgtctggttgtcgtctgtcatctcctcctgtctggcccgaggccgccccgtgactgtgaccgagggagggagggctgcctgatccctctcctcgcctgccttctggaagacttcagaagattgagcctcactggtgccaggaagccaaagcttactttgtagaactgacactaaactacccgaaggacttaggtgctttgtgtacttaaccccaggacctccttactttttaatataaagagtgatgttgtatttcgtgttctgcactttttaatataaagagtgatgttgtatttc

SEQ ID NO: 479 - DNA, 3756 bp, Homo sapiens
  ref <308>: DATABASE ACCESSION NUMBER: NCBI / NM_014228
  ref <309>: DATABASE ENTRY DATE: 2011-12-17
  ref <313>: RELEVANT RESIDUES IN SEQ ID NO: (1)..(3756)
agaaagccgagggtttccgtcgcgaacccccctccccactcgctcagggctctccaatccgcagctctgcgtgcgggggcgcgcgcatccccccgccgtccgtccgtcagctgtctgtctgggtgtctatgcgggcgcagcagtgcacccttccccagcctcgggcgctgcgcagggacagacaaggcattcgcagcgccctgcccgcgctccacgcccgcagccgccagacggcagcgcctgcgtccgtgcccgccccagccggtgcgcgggagccgcgggggcaaaggcgcagtggccagcggaccatctctcgtgccctcgctctctgcgctccggggcagctgagccccggccacccgctctccaagatgaagaagctccagggagctcacctccgcaagcctgtcaccccagacctgctgatgacccccagtgaccagggcgatgtcgacctggatgtggactttgctgcacaccgggggaactggacaggcaagctggacttcctgctgtcctgcattggctactgtgtaggcctggggaatgtctggcgcttcccctatcgagcgtacaccaatggaggaggcgccttcctcgtgccctacttcctcatgctggccatctgtggcatccccctcttcttcctggagctctccctgggccagttctccagcctagggcccctggctgtctggaaaatcagccctctcttcaaaggcgccggcgcagccatgctgctcatcgtgggcttggtggccatctactacaacatgatcatcgcctacgtgctcttctacctcttcgcctccctcaccagcgacctaccctgggagcactgtggcaactggtggaacacagaactctgcctggagcacagagtctccaaggacggcaacggggccctgcccctcaacctcacctgcaccgtcagccccagcgaggagtactggagccgctacgtcctccacatccaaggcagccagggcatcggcagccctggggagatccgctggaacctctgcctctgcctgctgctggcctgggtcatcgtgttcctctgtatcctcaagggtgtgaagtcttcgggcaaggtggtgtatttcacggccacgttcccctacctcatcctgctcatgctgctggtccgcggagtcaccctcccaggggcctggaagggcatccagttctatctcaccccccagttccaccacttgttgtcttccaaggtgtggattgaagctgctcttcagatcttctattccctgggtgtgggcttcggggggctcctcacctttgcctcctacaacacgtttcaccagaacatctatagagacactttcatcgtcactctgggcaacgccatcaccagcatcctggctggctttgccatcttctccgtgctgggctacatgtctcaggagctgggcgtgcctgtggaccaagtagccaaagcaggccctggcctggcctttgtcgtctacccacaggccatgaccatgctgcctctgtcacccttctggtcctttctcttcttcttcatgcttctgactctcggcctagatagccagtttgcttttctggagaccattgtgacagctgtgacagatgagttcccatactacctgcggcccaagaaggcggtgttctcagggctcatctgcgtggccatgtacctgatggggctgatcctcaccactgatgggggcatgtactggctggtccttctggatgactacagcgccagcttcgggctgatggtggtggttatcaccacgtgccttgccgtgacacgggtgtatggcattcagaggttctgccgagacatccacatgatgctgggcttcaagccgggcctctacttcagggcctgctggctgttcctgtccccagccacgctcttggccctcatggtgtatagcatcgtcaagtaccagccctcggagtatggcagttaccgcttcccgccctgggctgagctgctgggcatcctgatgggcctgctgtcctgcctcatgatcccagctggcatgctggtggctgtgcttcgagaagagggctcactctgggagcggctccaacaggccagccggccggccatggactggggaccatcgctggaggagaaccggacgggcatgtatgtggccacgctggctgggagccagtcaccaaagccactgatggtgcacatgcgcaagtacgggggcatcaccagcttcgagaacacggccatcgaggtggaccgtgagattgcagaggaggaggagtcgatgatgtgaggcaggaggcaggcgggcagaaggccctgcccgggacctcacagtcccttcttagaagcctgcaaaggtcagctgtgccctctgggattctgagaggctatgggggggcctgccatagggatgccagtcccccagtgggggtcccttctgcagcctctgcctctcctgaaacctctgacaaccccctacacacacacacaggcatactcagacccactcaaagctgagaatgatccaactcagccctactttgcggatggacatattaaggccaggaggggagggacttgccccaggtcgcatggcagaggggacttgaacccacgcctcctgaccagccagctccctttcccatggggcagccggcaccaccttctcatctctattcagggcctacacccctccctttttggggggagcctgtccccacacaccttagcacaaccagaatcttgagttgggcagggaaggtcagggctacagaggctcttgaggctccgaggccctggggatcaaaggtcaatgagttaggtggggagaaagatccctgggggctcctgtatgcaggactcctgaaggaggtgggagctgagggccctggaggatggggaaggtttgcagagagaggaagaagagggcagggtggggaggagctctgggccagaggatgctgagctgcctgggcagagaccaagagggttggagacactagttttaccaggttacaggagggttcaagacagaaggaaaactaacagagggggagccagggatgatggggtgggcaggggatttgcatgatgaggagtatcattccagatctgtgcagagcggatcggacgggacagggtggagcggggaggcctgtgcaaagtgggaaagagctgccggtggcctgagccagggtgctggggctgcgggtggggaaaggaggccccagcacttcagacaaagaccaccccttcacccactggaccccaagccgcaaaagctggggaggtaggaagggtcactgtgagggcccagggcccctctcttcccatctcccttgtcctggtggccttcagtgtctcttccagttccaggagctgctgggaagctggccttcattgttggtgacagggcaaccatgggactaggaggtggcccatacacatggctggctggtcctgaggccacccaccttgttccaggacatgggcccgggcccggtgtgggggtagacgcagagggcagagggtagcccttggtactgtgggtccctcaaagaggagagtggggtgcagaaatgcctcagcatggctcatgcacacagcattctcccgtggggcagggttccctcatgcaacaggcctccctgtggccagcctctctgcctgtctctcgctgcgtccccccaaccccttgtgttctattggttcattgttaataaatatcaaatgaggtcacgctccttaaaaaaaaaaaaaaaaaa

SEQ ID NO: 480 - DNA, 2259 bp, Homo sapiens
  ref <308>: DATABASE ACCESSION NUMBER: NCBI / NM_006411
  ref <309>: DATABASE ENTRY DATE: 2011-11-28
  ref <313>: RELEVANT RESIDUES IN SEQ ID NO: (1)..(2259)
acttcctggccggccccggaaaccagcaggcgttggggaggggtggcgggggaatagcggcggcagcagccccagccctcagagagacagcagaaagggagggagggagggtgctggggggacagccccccaccattcctaccgctatgggcccaacctcccactcccacctcccctccatcggccggggctaggacacccccaaatcccgtcgcccccttggcaccgacaccccgacagagacagagacacagccatccgccaccaccgctgccgcagcctggctggggagggggccagccccccaggccccctacccctctgaggtggccagaatggatttgtggccaggggcatggatgctgctgctgctgctcttcctgctgctgctcttcctgctgcccaccctgtggttctgcagccccagtgccaagtacttcttcaagatggccttctacaatggctggatcctcttcctggctgtgctcgccatccctgtgtgtgccgtgcgaggacgcaacgtcgagaacatgaagatcttgcgtctaatgctgctccacatcaaatacctgtacgggatccgagtggaggtgcgaggggctcaccacttccctccctcgcagccctatgttgttgtctccaaccaccagagctctctcgatctgcttgggatgatggaggtactgccaggccgctgtgtgcccattgccaagcgcgagctactgtgggctggctctgccgggctggcctgctggctggcaggagtcatcttcatcgaccggaagcgcacgggggatgccatcagtgtcatgtctgaggtcgcccagaccctgctcacccaggacgtgagggtctgggtgtttcctgagggaacgagaaaccacaatggctccatgctgcccttcaaacgtggcgccttccatcttgcagtgcaggcccaggttcccattgtccccatagtcatgtcctcctaccaagacttctactgcaagaaggagcgtcgcttcacctcgggacaatgtcaggtgcgggtgctgcccccagtgcccacggaagggctgacaccagatgacgtcccagctctggctgacagagtccggcactccatgctcactgttttccgggaaatctccactgatggccggggtggtggtgactatctgaagaagcctgggggcggtgggtgaaccctggctctgagctctcctcccatctgtccccatcttcctccccacacctacccacccagtgggccctgaagcagggccaaaccctcttccttgtctcccctctccccacttattctcctctttggaatcttcaacttctgaagtgaatgtggatacagcgccactcctgccccctcttggccccatccatggactcttgcctcggtgcagtctccactcttgacccccacctcctactgtcttgtctgtgggacagttgcctccccctcatctccagtgactcagcctacacaagggaggggaacattccatccccagtggagtctcttcctatgtggtcttctctacccctctaccccacattggccagtggactcatccattctttggaacaaatcccccccactccaaagtccatggattcaatggactcatccatttgtgaggaggacttctcgccctctggctggaagctgatacctgaagcactcccaggctcatcatgggagctttcctcagcaccttcaccttccctcccagtgtagcctcctgtcagtgggggctggacccttctaattcagaggtctcatgcctgcccttgcccagatgcccagggtcgtgcactctctgggataccagttcagtctccacatttctggttttctgtccccatagtacagttcttcagtggacatgaccccacccagccccctgcagccctgctgcaccatctcaccagacacaaggggaagaagcagacatcaggtgctgcactcacttctgccccctggggagttggggaaaggaacgaaccctggctggaggggataggagggcttttaatttatttctttttctgttgaggcttccccctctctgagccagttttcatttcttcctggtggcattagccactccctgcctctcactccagacctgttcccacaactggggaggtaggctgggagcaaaaggagagggtgggacccagttttgcgtggttggtttttattaattatctggataacagcaaaaaaactgaaaataaagagagagagagatctgggaa

SEQ ID NO: 481 - DNA, 758 bp, Homo sapiens
  ref <308>: DATABASE ACCESSION NUMBER: NCBI / NM_021134
  ref <309>: DATABASE ENTRY DATE: 2011-08-13
  ref <313>: RELEVANT RESIDUES IN SEQ ID NO: (1)..(758)
aagcgagggggcgctgtgccaggcggcggccgtgcggggcgggcgcgctgctccttccgcctcgcggaccccggaagcgcgcgtggccgccatggcgcggaatgtggtgtaccccctgtaccggctgggtggcccacaacttcgggtgttccgaaccaacttcttcattcagctggtgcggcccggtgtggcccagcccgaggacaccgtgcagttccggatccccatggaaatgacaagggtggacctcaggaattacctcgagggcatctataacgtgcccgtggctgctgtgcggacacgggtgcagcatggctctaacaagagaagagatcacagaaacgtgaggatcaagaagccggactacaaggtcgcctacgtgcagctggcccatggacagaccttcacgttcccagatctgtttcccgagaaagacgagagccctgaaggcagcgctgccgacgacctctacagcatgctcgaggaggagaggcagcagaggcagagcagcgacccgcggcggggcggcgtccccagctggttcgggctgtgacggggtggccagcagggacgcgccccaggtgggcagctgtggcagagcagcgacccgcggcggggcggcatccccagctggttcgggccgtgacggggcggccagcagggacgcgccccaggtgggcagctgtggcagagcagtcccgacacctaaataaaagtcttgctgcaggagaaagagccggaaaaaaaaaaaaaaaaaa

SEQ ID NO: 482 - DNA, 2119 bp, Homo sapiens
  ref <308>: DATABASE ACCESSION NUMBER: NCBI / NM_021974
  ref <309>: DATABASE ENTRY DATE: 2011-11-28
  ref <313>: RELEVANT RESIDUES IN SEQ ID NO: (1)..(2119)
atttcctctgggttacggcgcaggcgcaagataagctaggagccgcgcgagtcgtagtgtcgctgtttgcgggtctccgcgcgggaccggggcgcagcggggtcgctgaggcgagggtgtcatgtcagacaacgaggacaattttgatggcgacgactttgatgatgtggaggaggatgaagggctagatgacttggagaatgccgaagaggaaggccaggagaatgtcgagatcctcccctctggggagcgaccgcaggccaaccagaagcgaatcaccacaccatacatgaccaagtacgagcgagcccgcgtgctgggcacccgagcgctccagattgcgatgtgtgcccctgtgatggtggagctggagggggagacagatcctctgctcattgccatgaaggaactcaaggcccgaaagatccccatcatcattcgccgttacctgccagatgggagctatgaagactggggggtggacgagctcatcatcaccgactgagctggagtcatcttcctgcccttgccccatgcccaattttcattctcactttatatgtgtaaataataaaatattcaactttccaacccccttcccctctgcttatctgcaatgtcaccacctgttgcttccccgttaccgccatgctgcgtggagcatgcacctattccagtggccctgtgactgtcagctccttaagaagcaccaggggcccttagcccctttggatcccccacatccttccctccatctccctgttccccagagcaaaggctgctgcaggggagacacctcagctgccttccaagcagacagacaagtctttgtgcccagggagctggttgccacggaaacccccaatttcctttccagtggggactggctgcaggggcttctcccttctcaggagtatcacagagcaggtctcatcaagccacccattgtttcctaaggacctgcttcgagcctcttatcgtgggctcggatcccctttcaggagcagtgccccagcaggaagcgtgggggtgtgctgatctcccaccctccccaggcagagccctgctgggcaagtcagcagctggagcaaggaccgagcacctgcctacccctgcccccatggctctgtccccactcctcctcaggactctgcccacacgctgtcctctgtggcccacctctttggtgtgccacacccatgccttcttcctagcctctataagatatcctttccctcctatttggggctggtgatcccctgaggccttggggacatggtgctggggtggtggtgctcctgggttccaggtgttacattaagtcagagctggagttcccccttcctctgcctgaggttctaatgggtcctcttcctttctccaccctgcttacccaacctgaggtaagaccagtcacactggctcctccctcctagagggggtcagggggagggtgtatattgacatgaacagggatagagggtaaactggctccctgaatatgccagccttaacctccattccactgccagctccccttcaaagaggaggagctgggcttccctaacctctgcaggaggcagggcctccaggcctaggtgcagcctggccctgggatgggatgtggggagtgaatggtgaggatctgcattggtgggaggggtgtccgctgccctggagaagggttaattcagggagcagtggacttcacactcccatccaccctcctccaagcctgtggaatcctttaatcaagttgggtgctgaaatttcagctctgaaatgccgcctttgtgctggcatccaggcagccgccccagagtgcgggggtcactttctcggccccatttctctaaatggtctctttgttccctgctgggctgctcagtatcagatgtgattaaagggagatggggtttgggctggggaggaggggaattgggggttaacccttaggggatagagtgcaagggaaatgggacagaaggggtgtttttcctcctgtcttcctcttcccattctcctcttttggggagtcccctgctattcagctgtctgggcctggcttttgacttctcttgaataaaatgtcccggtcaccaaaaaaaaaaaaaaaaaa

SEQ ID NO: 483 - DNA, 583 bp, Homo sapiens
  ref <308>: DATABASE ACCESSION NUMBER: NCBI / NM_006808
  ref <309>: DATABASE ENTRY DATE: 2011-11-20
  ref <313>: RELEVANT RESIDUES IN SEQ ID NO: (1)..(583)
gccagctgccggtctttcgggggctccgtaactttctatccgtccgcgtcagcgccttgccaccctcatctccaatatgcctggtccgacccccagtggcactaacgtgggatcctcagggcgctctcccagcaaagcagtggccgcccgggcggcgggatccactgtccggcagaggaaaaatgccagctgtgggacaaggagtgcaggccgcacaacctcggcaggcaccggggggatgtggcgattctacacagaagattcacctgggctcaaagttggccctgttccagtattggttatgagtcttctgttcatcgcttctgtatttatgttgcacatttggggcaagtacactcgttcgtagattcagttacatccatctgtcatctgaagaaggaggaaaaaacccaacatttcttggaccaaaagtatagtgactatctgttcatgagagaaattttctgtaagcttgctgttttacaggggatttatcaataattgattttgaggaatcagtttttttctatggctaataaactttttaattcacttatactgaaaaaaaaaaaaaaaaaaaaaa

SEQ ID NO: 484 - DNA, 576 bp, Homo sapiens
  ref <308>: DATABASE ACCESSION NUMBER: NCBI / NM_005617
  ref <309>: DATABASE ENTRY DATE: 2011-11-20
  ref <313>: RELEVANT RESIDUES IN SEQ ID NO: (1)..(576)
ctccgccccctcccactctctctttccggtgtggagtctggagacgacgtgcagaaatggcacctcgaaaggggaaggaaaagaaggaagaacaggtcatcagcctcggacctcaggtggctgaaggagagaatgtatttggtgtctgccatatctttgcatccttcaatgacacttttgtccatgtcactgatctttctggcaaggaaaccatctgccgtgtgactggtgggatgaaggtaaaggcagaccgagatgaatcctcaccatatgctgctatgttggctgcccaggatgtggcccagaggtgcaaggagctgggtatcaccgccctacacatcaaactccgggccacaggaggaaataggaccaagacccctggacctggggcccagtcggccctcagagcccttgcccgctcgggtatgaagatcgggcggattgaggatgtcacccccatcccctctgacagcactcgcaggaaggggggtcgccgtggtcgccgtctgtgaacaagattcctcaaaatattttctgttaataaattgccttcatgtaaactgtttcaaaaaaaaa

SEQ ID NO: 485 - DNA, 2274 bp, Homo sapiens
  ref <308>: DATABASE ACCESSION NUMBER: NCBI / NM_005520
  ref <309>: DATABASE ENTRY DATE: 2011-12-25
  ref <313>: RELEVANT RESIDUES IN SEQ ID NO: (1)..(2274)
gcagaactcgcacaagggaccttatttaggttgcgcaggcgcccgctggccatttcgtcttagccacgcagaagtcgcgtgtctagtttgtttcgacgccggaccgcgtaagagacgatgatgttgggcacggaaggtggagagggattcgtggtgaaggtccggggcttgccctggtcttgctcggccgatgaagtgcagaggtttttttctgactgcaaaattcaaaatggggctcaaggtattcgtttcatctacaccagagaaggcagaccaagtggcgaggcttttgttgaacttgaatcagaagatgaagtcaaattggccctgaaaaaagacagagaaactatgggacacagatatgttgaagtattcaagtcaaacaacgttgaaatggattgggtgttgaagcatactggtccaaatagtcctgacacggccaatgatggctttgtacggcttagaggacttccctttggatgtagcaaggaagaaattgttcagttcttctcagggttggaaatcgtgccaaatgggataacattgccggtggacttccaggggaggagtacgggggaggccttcgtgcagtttgcttcacaggaaatagctgaaaaggctctaaagaaacacaaggaaagaatagggcacaggtatattgaaatctttaagagcagtagagctgaagttagaactcattatgatccaccacgaaagcttatggccatgcagcggccaggtccttatgacagacctggggctggtagagggtataacagcattggcagaggagctggctttgagaggatgaggcgtggtgcttatggtggaggctatggaggctatgatgattacaatggctataatgatggctatggatttgggtcagatagatttggaagagacctcaattactgtttttcaggaatgtctgatcacagatacggggatggtggctctactttccagagcacaacaggacactgtgtacacatgcggggattaccttacagagctactgagaatgacatttataattttttttcaccgctcaaccctgtgagagtacacattgaaattggtcctgatggcagagtaactggtgaagcagatgtcgagttcgcaactcatgaagatgctgtggcagctatgtcaaaagacaaagcaaatatgcaacacagatatgtagaactcttcttgaattctacagcaggagcaagcggtggtgcttacgaacacagatatgtagaactcttcttgaattctacagcaggagcaagcggtggtgcttatggtagccaaatgatgggaggcatgggcttgtcaaaccagtccagctacgggggcccagccagccagcagctgagtgggggttacggaggcggctacggtggccagagcagcatgagtggatacgaccaagttttacaggaaaactccagtgattttcaatcaaacattgcataggtaaccaaggagcagtgaacagcagctactacagtagtggaagccgtgcatctatgggcgtgaacggaatgggagggttgtctagcatgtccagtatgagtggtggatggggaatgtaattgatcgatcctgatcactgactcttggtcaaccttttttttttttttttttttttctttaagaaaacttcagtttaacagtttctgcaatacaagcttgtgatttatgcttactctaagtggaaatcaggattgttatgaagacttaaggcccagtatttttgaatacaatactcatctaggatgtaacagtgaagctgagtaaactataactgttaaacttaagttccagcttttctcaagttagttataggatgtacttaagcagtaagcgtatttaggtaaaagcagttgaattatgttaaatgttgccctttgccacgttaaattgaacactgttttggatgcatgttgaaagacatgcttttatttttttgtaaaacaatataggagctgtgtctactattaaaagtgaaacattttggcatgtttgttaattctagtttcatttaataacctgtaaggcacgtaagtttaagctttttttttttttaagttaatgggaaaaatttgagacgcaataccaatacttaggattttggtcttggtgtttgtatgaaattctgaggccttgatttaaatctttcattgtattgtgatttccttttaggtatattgcgctaagtgaaacttgtcaaataaatcctccttttaaaaactgcaaaaaaaaaaaaaaaaaaaaaaaaaa

SEQ ID NO: 486 - DNA, 1319 bp, Homo sapiens
  ref <308>: DATABASE ACCESSION NUMBER: NCBI / NM_006755
  ref <309>: DATABASE ENTRY DATE: 2011-11-20
  ref <313>: RELEVANT RESIDUES IN SEQ ID NO: (1)..(1319)
cgcgcccgtcccgtcgccgccgccgccgccgcagacccctcggtcttgctatgtcgagctcacccgtgaagcgtcagaggatggagtccgcgctggaccagctcaagcagttcaccaccgtggtggccgacacgggcgacttccacgccatcgacgagtacaagccccaggatgctaccaccaacccgtccctgatcctggccgcagcacagatgcccgcttaccaggagctggtggaggaggcgattgcctatggccggaagctgggcgggtcacaagaggaccagattaaaaatgctattgataaactttttgtgttgtttggagcagaaatactaaagaagattccgggccgagtatccacagaagtagacgcaaggctctcctttgataaagatgcgatggtggccagagccaggcggctcatcgagctctacaaggaagctgggatcagcaaggaccgaattcttataaagctgtcatcaacctgggaaggaattcaggctggaaaggagctcgaggagcagcacggcatccactgcaacatgacgttactcttctccttcgcccaggctgtggcctgtgccgaggcgggtgtgaccctcatctccccatttgttgggcgcatccttgattggcatgtggcaaacaccgacaagaaatcctatgagcccctggaagaccctggggtaaagagtgtcactaaaatctacaactactacaagaagtttagctacaaaaccattgtcatgggcgcctccttccgcaacacgggcgagatcaaagcactggccggctgtgacttcctcaccatctcacccaagctcctgggagagctgctgcaggacaacgccaagctggtgcctgtgctctcagccaaggcggcccaagccagtgacctggaaaaaatccacctggatgagaagtctttccgttggttgcacaacgaggaccagatggctgtggagaagctctctgacgggatccgcaagtttgccgctgatgcagtgaagctggagcggatgctgacagaacgaatgttcaatgcagagaatggaaagtagcgcatccctgaggctggactccagatctgcaccgccggccagctgggatctgactgcacgtggcttctgatgaatcttgcgttttttacaaattggagcagggacagatcatagatttctgattttatgtaaaattttgcctaatacattaaagcagtcacttttcctgtgctgtttcaaaaaaaaaaaaaaaaaaaaaaaaaaaaaaaaaaaaaaaaaaaaaaaaaaaaaaaaaaaaaaaaaaaaaaaaaaaaa

SEQ ID NO: 487 - DNA, 969 bp, Homo sapiens
  ref <308>: DATABASE ACCESSION NUMBER: NCBI / NM_006010
  ref <309>: DATABASE ENTRY DATE: 2011-11-28
  ref <313>: RELEVANT RESIDUES IN SEQ ID NO: (1)..(969)
ggaggcggtgcggcgcggcgggtgcggttcagtcggtcggcggcggcagcggaggaggaggaggaggaggaggaggaggaggatgaggaggatgtgggccacgcaggggctggcggtggcgctggctctgagcgtgctgccgggcagccgggcgctgcggccgggcgactgcgaagtttgtatttcttatctgggaagattttaccaggacctcaaagacagagatgtcacattctcaccagccactattgaaaacgaacttataaagttctgccgggaagcaagaggcaaagagaatcggttgtgctactatatcggggccacagatgatgcagccaccaaaatcatcaatgaggtatcaaagcctctggcccaccacatccctgtggagaagatctgtgagaagcttaagaagaaggacagccagatatgtgagcttaagtatgacaagcagatcgacctgagcacagtggacctgaagaagctccgagttaaagagctgaagaagattctggatgactggggggagacatgcaaaggctgtgcagaaaagtctgactacatccggaagataaatgaactgatgcctaaatatgcccccaaggcagccagtgcacggaccgatttgtagtctgctcaatctctgttgcacctgagggggaaaaaacagttcaactgcttactcccaaaacagcctttttgtaatttattttttaagtgggctcctgacaatactgtatcagatgtgaagcctggagctttcctgatgatgctggccctacagtacccccatgaggggattcccttccttctgttgctggtgtactctaggacttcaaagtgtgtctgggatttttttattaaagaaaaaaaatttctagctgtccttgcagaattatagtgaataccaaaatggggttttgccccaggaggctcctaaaaaaaaaaaaaaaaaaaaaaaaaaaaaaa

SEQ ID NO: 488 - DNA, 3227 bp, Homo sapiens
  ref <308>: DATABASE ACCESSION NUMBER: NCBI / NM_005088
  ref <309>: DATABASE ENTRY DATE: 2011-11-20
  ref <313>: RELEVANT RESIDUES IN SEQ ID NO: (1)..(3227)
agtggaaatgcgtcatagagggcgggcggcgacggcggtggcggcgtcggaggcgcctccgggggacggtggcggctcccggcggtgaggccgcgcctgtccggggatcgtcgagggacggcgggagcttgggccagcggcggcggcggcctgggacgcaggcggagccccgcgcaggcccaaggtcccggaggctatggcagcggctaccatcgtgcacgacacgtctgaggccgtggagctctgccctgcttacggcttgtacctgaagcccatcaccaagatgaccatcagcgtggcactcccgcagctgaagcagccggggaagtccatctccaactgggaggtgatggagaggctgaagggcatggtgcagaaccaccagttctccacgctgcgtatttccaagagcaccatggacttcatccgcttcgagggggaggtggagaacaagagcctggtcaagtcttttctggcctgcctggacggcaagaccatcaagctcagcggcttctccgacatcctgaaggtgcgcgcggccgagttcaagatcgacttccccacccgccacgactgggactccttcttccgcgacgccaaggacatgaacgagaccctgccgggggagcggccggacaccatccacctggaggggctgccctgcaagtggttcgccctgaaggagtcgggctccgagaagcccagcgaggacgtcctggtcaaggtgtttgagaagttcggggagatccggaatgtggacatccccatgctggacccctaccgggaggagatgacgggccgcaacttccacaccttcagtttcggggggcacttgaacttcgaggcctatgtgcagtaccgcgagtacatgggcttcatccaggccatgagcgccctgcgcgggatgaaactcatgtacaagggcgaggacggcaaggccgtggcctgcaacatcaaggtttcttttgattcgaccaaacacctgagtgatgcctcaattaagaagcggcagctggagaggcagaagcttcaggaactggagcagcaaagagaagaacaaaagcgcagagagaaggaagcggaggagaggcagcgagcggaggaaaggaaacaaaaggagctggaagagctggagcgagagaggaaaagagaagagaagcttcgcaagagggagcagaagcagagggaccgtgagctgcgccggaatcagaagaagctggagaagctgcaggcggaggagcagaagcagctgcaggagaagatcaagctggaggagcgcaagctgctgctggcccagaggaacctgcagtccatccggctcatcgccgagctgctcagcagagccaaggctgtgaagctacgggaacaggagcagaaggaggagaagctgaggctccagcagcaggaggagcggcggcggctgcaggaggccgagctgcggcgcgtggaggaggagaaggagcgcgcgctgggcctgcagcggaaagagcgggagctgcgcgagcggctgctgagcatcctgctgagcaagaagccggacgacagccacacacacgacgagctgggcgtggcacacgccgacctgctgcagcccgtcctggacatcctgcagaccgtgtcgtccggctgtgtgagcgccaccacgctgcaccccctcgggggccagcccccggccggtgcccccaaggagagcccggcccacccagaggccgacggcgctcccaaaagcgtgaacgggagcgtggccgaggaggccccatgcaaggaggttcagagctcctgtcgtgtggtccccgaggatggctctccagagaagaggtgcccgggcggcgtcctctcctgcattcctgacaacaaccaacagcccaagggcatccctgcctgcgagcagaatgtctccagaaaggacacccggtcagaacaggacaagtgcaaccgggagcccagcaagggccggggccgggccaccggagacgggcttgctgaccggcacaagcgggagaggagccgggccaggcgggccagcagcagggaggacgggaggccacgcaaggagcggcggccccacaagaagcacgcctacaaggatgacagcccccgccggcgcagcacgagcccggaccacacccggtcccggaggtcccacagcaaagacaggcaccggagggagcggagccgggagcggaggggcagcgccagcaggaagcacagccgccaccgccgccgaagcgagcggtcgcgctcccggtccccgagcaggcaccgcagtacctggaacaggtaatgacgggcacggcctccccacggcctgtccgggaaagaccaggacctgctcgagcctcctggccgctccttggccgctctccgtccacccctgcaaagccaagacccttctgcagccacgaatgtccacggagcccgccggcaggaaggaagacaccatgctttagagatccatctttctccactcaccgcagcgtacttggcacttcagtttcaaacacgtagtcctttaaaacttgatccgatagctttaatgcggccggtcctctctcagtcaggaaaattgcacagaccgacagtcgtgaggatggcagagctgctgcattcccccacacggggatttctgtgtctgcttggcgacctccctgcgtgcacggcctaggaggtgcacgggccaccatagtcacactggcactgaaaagaaagcgttgccctggtgattctttcccccccgtttgtaatgttaactgatcaggaagtgcagtttgggtgggatgccgaatcgtcgtgctgacattgagtcacggatgaggaaggtacaagtcctttaagatcaaaactcaaacgggccgttctttctaaggtgtcggtatgtggggagtggtacaaaatggtctgatgctccttcaaaaacattcactttttacaacgtcaaggaattaagcataaaaaagattggttaaaagctttggtttctagtaaaggttagtgtgtgtggtttttttaagaagctgttttgctaaattatttttacttggaatgtttcaaacagatttcaggctgcaaacttgttttataatcgtttgcttctccaagtgaagctcagaaatacctaaaaatagctgtaacgttcgcgttaggaaagatggtgtttattccagtttgcatttttatggtgaaataaaatccttttccaatgaactaaaaaaaaaaaaaaaaaaaaa

SEQ ID NO: 489 - DNA, 2504 bp, Homo sapiens
  ref <308>: DATABASE ACCESSION NUMBER: NCBI / NM_014754
  ref <309>: DATABASE ENTRY DATE: 2011-08-13
  ref <313>: RELEVANT RESIDUES IN SEQ ID NO: (1)..(2504)
ctttgccgtccggctattagcctactgtggctagtcacccccggggtcccggccttctcgggctggggccgccgccaccgcggcaggacggggaggcgggccatggcgtcctgcgtggggagccggaccctaagcaaggatgatgtgaactacaaaatgcatttccggatgatcaacgagcagcaagtggaggacatcaccattgacttcttctaccggccgcataccatcaccctgctcagcttcaccatcgtcagcctcatgtacttcgcctttaccagggatgactctgttccagaagacaacatctggagaggcatcctctctgttattttcttctttcttatcatcagtgtgttagctttccccaatggtccgttcactcgacctcatccagccttatggcgaatggtttttggactcagtgtgctctacttcctgttcctggtattcctactcttcctgaatttcgagcaggttaaatctctaatgtattggctagatccaaatcttcgatacgccacaagggaagcagatgtcatggagtatgctgtgaactgccatgtgatcacctgggagaggattatcagccactttgatatttttgcatttggacatttctggggctgggccatgaaggccttgctgatccgtagttacggtctctgctggacaatcagtattacctgggagctgactgagctcttcttcatgcatctcctccccaattttgccgagtgctggtgggatcaagtcattctggacatcctgttgtgcaatggcggtggcatttggctgggcatggtcgtttgccggtttttagagatgaggacttaccactgggcaagcttcaaggacattcataccaccaccgggaagatcaagagagctgttctgcagttcactcctgctagctggacctatgttcgatggtttgaccccaaatcttcttttcagagagtagctggagtgtaccttttcatgatcatctggcagctgactgagttgaataccttcttcttgaagcatatctttgtgttccaagccagtcatccattaagttggggtagaattctctttattggtggcatcacagctcccacagtgagacagtactacgcttacctcaccgacacacagtgcaagcgcgtaggaacacaatgctgggtgtttggggtcattggtttcctggaggccattgtttgcataaaatttggacaagatctcttctctaagacccaaatactctatgttgtgctttggcttctttgcgtggctttcaccactttcctctgtctgtacggcatgatttggtatgcagaacactatggtcaccgagaaaagacctactcggagtgtgaagatggcacctacagtccagagatctcctggcatcacaggaaagggacaaaaggttctgaagacagcccacccaagcatgcaggcaacaacgaaagccattcttccaggagaaggaatcggcattccaagtcaaaagtcaccaatggcgttggaaagaaatgaaaaaccctggttaatcaaagatgttccagagtgcctagaactgagagggaaatggaactcatttggaactccccgtgaggaggtcgaggcgcacagggcaagcaggaagaggcgagggcacttgggggtcattatttgagatcgtaagtcttgtttcccacagacctggccgcgtcaggcagatcatcgcctggggggcctttgccaacgtggggtctcttctaacttcagcacttgacatgcggtcaccggtggcagcgcggtgtgttgaagggaaacggtagctattcattcacagttgccaagagcagctccgcgcctgctggatcgtggatgcagcgtaaacatcttccttcagacgaggcattaaccccatggttaatggactggtcaccagtttttattttatttttatgaatctacctttccattgattgatttaagttcaggccacttttctgtcttttatttggttactgttgttatttgtttttaagttaggatgctttttaacagcctttagaagccgctgctgaaattgatactgggggaagggttccccttccttctagagcagaaaagggagagaagtgttgtattcctgtttggtaacctcagtctcctgtaagacctcctaccacatggcgagtatacaccaatcaggagagggtagctgcctgcataggagcctcgcttccgattattcccttcccaatattattcatccagacttagccacagtgcacaaaagcaaacctgctagagaggcagtgaacaccacagcttctccccagcttggtgccttttacatcgggtttgttctccttccatggtgtgttgctgacattgtcactgagtcccatgtgaggtgctggtgagtattacctttcatctgtgccatgctctagaaccttgaccttgatagttcaccacgtctgatggatccctgttttaaataaaaacgattcactttaaagcct

SEQ ID NO: 490 - DNA, 3551 bp, Homo sapiens
  ref <308>: DATABASE ACCESSION NUMBER: NCBI / NM_021953
  ref <309>: DATABASE ENTRY DATE: 2011-12-25
  ref <313>: RELEVANT RESIDUES IN SEQ ID NO: (1)..(3551)
tttcaaacagcggaacaaactgaaagctccggtgccagaccccacccccggccccggcccgggaccccctcccctcccgggatcccccggggttcccaccccgcccgcaccgccggggacccggccggtccggcgcgagcccccgtccggggccctggctcggcccccaggttggaggagcccggagcccgccttcggagctacggcctaacggcggcggcgactgcagtctggagggtccacacttgtgattctcaatggagagtgaaaacgcagattcataatgaaaactagcccccgtcggccactgattctcaaaagacggaggctgccccttcctgttcaaaatgccccaagtgaaacatcagaggaggaacctaagagatcccctgcccaacaggagtctaatcaagcagaggcctccaaggaagtggcagagtccaactcttgcaagtttccagctgggatcaagattattaaccaccccaccatgcccaacacgcaagtagtggccatccccaacaatgctaatattcacagcatcatcacagcactgactgccaagggaaaagagagtggcagtagtgggcccaacaaattcatcctcatcagctgtgggggagccccaactcagcctccaggactccggcctcaaacccaaaccagctatgatgccaaaaggacagaagtgaccctggagaccttgggaccaaaacctgcagctagggatgtgaatcttcctagaccacctggagccctttgcgagcagaaacgggagacctgtgcagatggtgaggcagcaggctgcactatcaacaatagcctatccaacatccagtggcttcgaaagatgagttctgatggactgggctcccgcagcatcaagcaagagatggaggaaaaggagaattgtcacctggagcagcgacaggttaaggttgaggagccttcgagaccatcagcgtcctggcagaactctgtgtctgagcggccaccctactcttacatggccatgatacaattcgccatcaacagcactgagaggaagcgcatgactttgaaagacatctatacgtggattgaggaccactttccctactttaagcacattgccaagccaggctggaagaactccatccgccacaacctttccctgcacgacatgtttgtccgggagacgtctgccaatggcaaggtctccttctggaccattcaccccagtgccaaccgctacttgacattggaccaggtgtttaagccactggacccagggtctccacaattgcccgagcacttggaatcacagcagaaacgaccgaatccagagctccgccggaacatgaccatcaaaaccgaactccccctgggcgcacggcggaagatgaagccactgctaccacgggtcagctcatacctggtacctatccagttcccggtgaaccagtcactggtgttgcagccctcggtgaaggtgccattgcccctggcggcttccctcatgagctcagagcttgcccgccatagcaagcgagtccgcattgcccccaaggtgctgctagctgaggaggggatagctcctctttcttctgcaggaccagggaaagaggagaaactcctgtttggagaagggttttctcctttgcttccagttcagactatcaaggaggaagaaatccagcctggggaggaaatgccacacttagcgagacccatcaaagtggagagccctcccttggaagagtggccctccccggccccatctttcaaagaggaatcatctcactcctgggaggattcgtcccaatctcccaccccaagacccaagaagtcctacagtgggcttaggtccccaacccggtgtgtctcggaaatgcttgtgattcaacacagggagaggagggagaggagccggtctcggaggaaacagcatctactgcctccctgtgtggatgagccggagctgctcttctcagaggggcccagtacttcccgctgggccgcagagctcccgttcccagcagactcctctgaccctgcctcccagctcagctactcccaggaagtgggaggaccttttaagacacccattaaggaaacgctgcccatctcctccaccccgagcaaatctgtcctccccagaacccctgaatcctggaggctcacgcccccagccaaagtagggggactggatttcagcccagtacaaacctcccagggtgcctctgaccccttgcctgaccccctggggctgatggatctcagcaccactcccttgcaaagtgctcccccccttgaatcaccgcaaaggctcctcagttcagaacccttagacctcatctccgtcccctttggcaactcttctccctcagatatagacgtccccaagccaggctccccggagccacaggtttctggccttgcagccaatcgttctctgacagaaggcctggtcctggacacaatgaatgacagcctcagcaagatcctgctggacatcagctttcctggcctggacgaggacccactgggccctgacaacatcaactggtcccagtttattcctgagctacagtagagccctgcccttgcccctgtgctcaagctgtccaccatcccgggcactccaaggctcagtgcaccccaagcctctgagtgaggacagcaggcagggactgttctgctcctcatagctccctgctgcctgattatgcaaaagtagcagtcacaccctagccactgctgggaccttgtgttccccaagagtatctgattcctctgctgtccctgccaggagctgaagggtgggaacaacaaaggcaatggtgaaaagagattaggaaccccccagcctgtttccattctctgcccagcagtctcttaccttccctgatctttgcagggtggtccgtgtaaatagtataaattctccaaattatcctctaattataaatgtaagcttatttccttagatcattatccagagactgccagaaggtgggtaggatgacctggggtttcaattgacttctgttccttgcttttagttttgatagaagggaagacctgcagtgcacggtttcttccaggctgaggtacctggatcttgggttcttcactgcagggacccagacaagtggatctgcttgccagagtcctttttgcccctccctgccacctccccgtgtttccaagtcagctttcctgcaagaagaaatcctggttaaaaaagtcttttgtattgggtcaggagttgaatttggggtgggaggatggatgcaactgaagcagagtgtgggtgcccagatgtgcgctattagatgtttctctgataatgtccccaatcataccagggagactggcattgacgagaactcaggtggaggcttgagaaggccgaaagggcccctgacctgcctggcttccttagcttgcccctcagctttgcaaagagccaccctaggccccagctgaccgcatgggtgtgagccagcttgagaacactaactactcaataaaagcgaaggtggacatgaaaaaaaaaaaaaaaaaaa

SEQ ID NO: 491 - DNA, 2341 bp, Homo sapiens
  ref <308>: DATABASE ACCESSION NUMBER: NCBI / NM_006908
  ref <309>: DATABASE ENTRY DATE: 2012-01-01
  ref <313>: RELEVANT RESIDUES IN SEQ ID NO: (1)..(2341)
gggaggccggatgtgagtggagcggccatttcctgtttctctgcagttttcctcagctttgggtggtggccgctgccgggcatcggcttccagtccgcggagggcgaggcggcgtggacagcggccccggcacccagcgccccgccgcccgcaagccgcgcgcccgtccgccgcgccccgagcccgccgcttcctatctcagcgccctgccgccgccgccgcggcccagcgagcggccctgatgcaggccatcaagtgtgtggtggtgggagacggagctgtaggtaaaacttgcctactgatcagttacacaaccaatgcatttcctggagaatatatccctactgtctttgacaattattctgccaatgttatggtagatggaaaaccggtgaatctgggcttatgggatacagctggacaagaagattatgacagattacgccccctatcctatccgcaaacagatgtgttcttaatttgcttttcccttgtgagtcctgcatcatttgaaaatgtccgtgcaaagtggtatcctgaggtgcggcaccactgtcccaacactcccatcatcctagtgggaactaaacttgatcttagggatgataaagacacgatcgagaaactgaaggagaagaagctgactcccatcacctatccgcagggtctagccatggctaaggagattggtgctgtaaaatacctggagtgctcggcgctcacacagcgaggcctcaagacagtgtttgacgaagcgatccgagcagtcctctgcccgcctcccgtgaagaagaggaagagaaaatgcctgctgttgtaaatgtctcagcccctcgttcttggtcctgtcccttggaacctttgtacgctttgctcaaaaaaaaacaaaaaaaaaaaacaaaaaaaaaaaacaacggtggagccttcgcactcaatgccaactttttgttacagattaatttttccataaaaccattttttgaaccaatcagtaattttaaggttttgtttgttctaaatgtaagagttcagactcacattctattaaaatttagccctaaaatgacaagccttcttaaagccttatttttcaaaagcgccccccccattcttgttcagattaagagttgccaaaataccttctgaactacactgcattgttgtgccgagaacaccgagcactgaactttgcaaagaccttcgtctttgagaagacggtagcttctgcagttaggaggtgcagacacttgctctcctatgtagttctcagatgcgtaaagcagaacagcctcccgaatgaagcgttgccattgaactcaccagtgagttagcagcacgtgttcccgacataacattgtactgtaatggagtgagcgtagcagctcagctctttggatcagtctttgtgatttcatagcgagttttctgaccagcttttgcggagattttgaacagaactgctatttcctctaatgaagaattctgtttagctgtgggtgtgccgggtggggtgtgtgtgatcaaaggacaaagacagtattttgacaaaatacgaagtggagatttacactacattgtacaaggaatgaaagtgtcacgggtaaaaactctaaaaggttaatttctgtcaaatgcagtagatgatgaaagaaaggttggtattatcaggaaatgttttcttaagcttttcctttctcttacacctgccatgcctccccaaattgggcatttaattcatctttaaactggttgttctgttagtcgctaacttagtaagtgcttttcttatagaaccccttctgactgagcaatatgcctccttgtattataaaatctttctgataatgcattagaaggtttttttgtcgattagtaaaagtgctttccatgttactttattcagagctaataagtgctttccttagttttctagtaactaggtgtaaaaatcatgtgttgcagctttatagtttttaaaatattttagataattcttaaactatgaaccttcttaacatcactgtcttgccagattaccgacactgtcacttgaccaatactgaccctctttacctcgcccacgcggacacacgcctcctgtagtcgctttgcctattgatgttcctttgggtctgtgaggttctgtaaactgtgctagtgctgacgatgttctgtacaacttaactcactggcgagaatacagcgtgggacccttcagccactacaacagaattttttaaattgacagttgcagaattgtggagtgtttttacattgatcttttgctaatgcaattagcattatgttttgcatgtatgacttaataaatccttgaatcata

SEQ ID NO: 492 - DNA, 2748 bp, Homo sapiens
  ref <308>: DATABASE ACCESSION NUMBER: NCBI / NM_014231
  ref <309>: DATABASE ENTRY DATE: 2011-11-20
  ref <313>: RELEVANT RESIDUES IN SEQ ID NO: (1)..(2748)
agtaagttccagcgcagctagaccgcggggtagtcggcgcgaggcggagcttggcagttccgtccacttcagccgcagcgtccctcgccgggtgtctcgccgcagcctccggagaggaacagaccctcactctctctgtcagaaaaatgtctgctccagctcagccacctgctgaagggacagaagggactgccccaggtgggggtccccctggccctcctcctaacatgaccagtaacagacgactacagcaaacccaggcacaagtggaggaggtggtggacatcatacgtgtgaacgtggacaaggtcctggagagggaccagaagctgtcagagctggatgaccgagctgatgccttgcaggcaggagcatcacaatttgagagcagtgctgccaagctaaagaggaagtattggtggaaaaactgcaagatgatgatcatgctgggagccatctgtgccatcatcgtggtagttattgtaatctacttttttacttgagaatgtaccaccccttccctgttgtccattgccatccacattcatgtcctctgccctctgtttgctctctcaacacacttccccacccaccgtcctccattccagcccaggcttctccatcacccattcctcctttttcgttgcgttcatttgcactctgtccctcaacactagaaatgctgctcgtggcacaatctaagtcattacccgaagagcaacagctggcgcctcctccctgcctgctttttctgtactctcaagttcccccaaagccccaaagagttggaggccaagggaaggggcagggaggggagtggctgaggcgaagtacccatgaagctgcccagacttgggaggagaagagtatcggtgcccatggtgacttctagaaaacctggccactggtaggagctagggaggggctgggaagatggcagctcactcagtactgcctggtcatgtggagctttccttcctggaccaggcctggagagggtcctgggggtggaccaaagtccaacttggtttcagtgcagtacccttttcgaaagtaaaaacttgttttttgtagttatttctaatctgttcgtccaggattttccgtgtctttggggatcttacaactttactttgttctccagaggcctggagaacacttagggattgtgaaaatagcaggacttgtttccatcctagaagcagtcccatgtgcttctagctggaaggagctttctcttctttacattttctacagcattctgtatgagggcaccaaataaatccatctagctggtagttttatctagccaaataatttaacctagctcccagttaattgttggcataaagagagagattgcctgttagttatagagaaacagtgagtcaagtgcttaatttgaaagtaacaagctcagaggaagccactccttgccctcgttaaagagggtcctgttcctctcttcctgttgatgaaggagcgtgagggtgttagcagtgtgagatctttggacacccatggaatcctttcctccacaccacccgtgcacttgccaaagacagggatgaggcaagtggttcttcctggggcccggccgatcctcaggatgcagagaagtcatgtagacccaccagccccaccttggggggaggcgtgccagcctgtgtcaggtgtgcttgtgtattgctgtgctgtcatggggccctctccttgagagccgcctctctgttcttcctgtagtatattcccctttgaaccaccctttcctgtctgaattctactttgcctcctttctcttcctcctctttgcatggtttgtgtgtatagacagtggaacctgaggatgggatctgctcagcctatcttcggggcaattgctgagcttcaggatgggctattaatgtgggataagcccaggtgcaaggggaggagggcaggctgggaacagagcggagaatgcccatggccctttattccttcttccctcggtccacgaacaggaagaggctgaggccatgctgggcagggtctggatgcccactttccatgcagcagcatttcattgctcaaaaccatccttcctttcctttcgcccttgtttcccacattcccttcgtcctgcccaagggcgggactgaagagctggaagaaagcagtcagtaccctcccaacggcccccctcgaaggtctccactctcctctgggctcctccttgcctaatgcagggggtcaccgctggagaagaaccaccactgtcctcgatgtgtcccaagcctggagcgaatccgtcctcttggctctcccagccctatcacaggaatcattcctgggtttctgtccctctgaggctcaccaggtgtagttggccttgttctttgggggtattagcccttctactttctttctcacccaccctgtaccctcttctgtgtgtctctgctatccccctttcctcccaccacccatgtgcatgagcaaatgtgcaacaaaaccctgggactttgcagtcaaatgaagctgagcttcccacatcccgttcttcggtttgccatgagacgatgtggggtttccactgtgtgtctgtcatcacctctttgtctttttttcctaaccctgatctcatacttgtatagagtaataacaacagttgtacttccaccaaaggcatgtggcatatttaccaatgtcatgtattctgaacaaaggcaaaaaatacaaattcctaccattaaaaaaaaaaaaaaa

SEQ ID NO: 493 - DNA, 7011 bp, Homo sapiens
  ref <308>: DATABASE ACCESSION NUMBER: NCBI / NM_014833
  ref <309>: DATABASE ENTRY DATE: 2001-02-03
  ref <313>: RELEVANT RESIDUES IN SEQ ID NO: (1)..(7011)
cgcttcctgcgcctcttcaggtcaccgcttgctctagttcccaggctttggcctctagtggatgagaatcaccgagtctgcggggctggacgctgaccgcccgggccagcacctaggcgggcgggagctgtgcggcccagggttcgcgcgggccgggtagaggctcgagccgggacccccgagcgtgaaccccggagccagcggcgctggggccagaggggccgggcgggaggtggtggcggaggcgaaggggcgacgggacctgggcctggcccgtgtgtgtcctcggcggcctggcgccggccgtcgctgtacggtgagccccagggaggcggatctgggccccgagaaggacacccgcctggatttgccccgtaggcccggcccgggcccctcgggagcagaacagccttggtgaggtggacaggaggggacttcgcgagcagacgcgcgcgccagcgacagcagcccgccccggcctctcgggagccgtggggcagaggctgcagagccccaggagggggccagtgtcattcaaagatgtggctgtggatttcacccaggaggagtggtggcaactggaccctgatgagaagataacatacggggatgtgatgttggagaactacagccatctagtttccctggcttatgaggtggcaacatcttgtacttcggagatctgaagccgagcaacttgcccaagtccttcttcttttcccattaacaagatatgatatcaccaagccaaacgtcatcattaagttggagcagggagaggagctgtggataacgggaggtgaatttccatgtcaacatagtccagcccttcacatcctcagccgaagatctcacttcctcccagaggcctttgctgactgacccctcagggattgtgggactttaccaaatcggtttgtaataacacctagaagacgctatccgatccatcaggcccagtattcctgtctgggggtacttcccaccgtgtgctggaatggttatcacaagaaggctgtgctgtcccctcgcaactccaggatggtgtgtagcccagtgactgtgaggatcgcccctcctgacagaagattttcgcgttctgcgataccagagcagataatcagctcaacactgtcctcaccatcaagtaacgccccagacccatgtgcaaaggagacagtactgagtgccctcaaagagaaggagaagaaaaggacagtggaggaagaagaccaaatattccttgatggccaggaaaataaaagaaggcgccatgatagcagtggcagtggacattcagcatttgagcccctggtggccaatggagtccccgcttcttttgtgcctaagcctgggtctctgaagagaggcctcaattctcagagctcagatgaccacttgaataagagatcccgaagctcttccatgagctccttgacaggcgcttacgcaagtggcatccctagctccagccgcaatgccattaccagttcctacagctccactcgaggcatctcacagctctggaagagaaatggccccagttcatcacccttctctagcccagcctcctcccgctcccagacaccggagaggccagcaaagaaaataagagaagaggagctgtgtcatcattccagttcttcaactccattggcagcagacagggagtcccagggagaaaaggctgcagatacaaccccaaggaagaaacaaaactcgaattctcagtctacacctggcagctctgggcagcgtaagcggaaagttcagctgctgccttctcggcgaggggaacagctgaccttgcctccacctccccagcttggctattcgatcactgccgaggacctagacttagagaagaaggcttcattacagtggttcaaccaggccttggaggacaagagcgatgctgcctcgaactctgtcactgagaccccacctatcactcagccttcatttacctttaccctgcctgctgctgcacctgcctccccacccacctccctcctggccccaagcaccaacccactgttagagagcttgaagaagatgcagactcccccgagcctgccaccctgcccagaatctgctggagcagcaaccactgaggccctctcacctccaaagacacccagcctcctacccccgctgggtttatcacagtcagggccgccagggctgctccccagcccctcctttgactccaaacccccgaccactttgctggggctgatccctgctccatccatggtaccagccactgacaccaaggcacctccaacccttcaggcagagacggctaccaaaccccaagccacatctgccccgtcccccgcccccaagcaaagcttcctgtttggaacacagaacacctcaccttccagccctgccgcccctgctgcatcttcagcacctcccatgttcaagcccattttcacggctccacccaagagtgagaaggaaggccccacaccgcctggcccttcagtcacagccacagcgccctccagctcctccctccccacgaccaccagcaccacagccccgaccttccagcctgtctttagcagcatggggccacctgcatctgtgcccttgcctgctcccttcttcaagcagacaactactcccgccactgctcccaccacaactgccccgctcttcactggcctggccagcgccacctctgctgtggctcccatcacctctgccagtccatccacagactctgcttcgaagcctgcgtttggctttggcataaacagtgtgagcagcagcagtgtgagtaccacgaccagcaccgccactgccgcctcacagcctttcctcttcggggcgccccaggcctctgctgccagcttcaccccggccatgggctccatattccagtttggcaaacctcctgccttgcccacaaccaccacagtcaccaccttcagccagtccctgcacactgccgtgccaacggccaccagcagcagcgctgccgactttagtggttttggcagcaccctcgccacctccgccccggccaccagcagccagcccactctgacgttcagtaacacgagcacccccacgttcaacattccctttggctcaagcgccaagtccccgctcccatcatatccgggagccaacccccagcccgcatttggggccgctgaggggcagccaccgggggccgccaagccggcccttgcccccagctttggcagctctttcacttttggaaactctgcagccccggctgctgcacccacacctgcacctccgtccatgatcaaggtcgtgcctgcgtacgtgcctacgcccatccatcctatctttggcggtgccacgcactcggcgtttgggttgaaagccacggcttcggccttcggcgctcccgccagctcacagcccgcctttggcggctccactgctgtcttcttcggtgcagccaccagctccggctttggagccaccacccagaccgccagcagcgggagcagcagctcggtgtttggcagcacaacaccatcacccttcacgtttgggggttcggcagcccccgctggcagtgggagctttgggatcaacgtggccaccccaggctccagcaccaccaccggagctttcagctttggagcaggacagagtgggagcacagccacctccacccccttcgcagggggcttaggtcagaacgccctgggcaccaccggccagagcacaccgtttgccttcaacgtgagcagcacaactgagagcaaacctgtgtttggaggcaccgccacccccacctttggtctgaacacccctgcgcctggagtgggcacatcaggcagcagcctctcctttggggcatcctcagcacccgcccaaggctttgttggtgttgcacctttcggcaacacttttgctcaccagcaagaacacagcccgaggaagggacccaataacctttcaaaacgcaaactgctgcctgcggtgagggcccagggtcctccacggagaggacaggcatcttcctttcccaccaggaaggagtgagcccggagcctctgctatgtgcaaggcggtgtgcaagcaccggctgcagctttttgctctcttctttctctttggggctgggctgggtgtgcgttctggtgctgatgctttggcctgtgaggctgagctagagaaatgtagatgttagatgtgccagtaccatcctgcgcctcccaagcatgcccccactcactcacgtcggcatctcgacccgttcaattacagcaacgaagaagccaccgctaagcgtggtcttgggggaagcccggaggcagtgctcggcacccgggaacgtgctcaggcctcggtggggccgggcaggcagggcgggagctagcctgcaagagaaacagccccaatgctgggtaagagagcagttcaccccatccccccctccacgaccctggcgcacgccctgtacctgaaggcgcccgggttctgctgcagcgcatcttgtaccatgtcttcattctcctcctggcagagggagcacatggagtagacgagccgctgcagggaagggaaagtgagcgcgtggcacagggctcgctgctggaaccctgccagggcatgcagacgcaccgggctaggtgtccctgccccgggctcctccagctgtctgctcggcatacctaaggaaaagcgtgtctcggttacacagcttcacaggctgcctcagtcctgaaatcctcgctcctgaaatcctcgcttcacagaggagaacttttgctccagggtcccaagcccattaaagtgtcagaactaagaccaaaacagatgactccaggtctaagctgctgtggacctctgagtccctcagccacgccttctcaccatctcacccgagccactgcaggaaggatccagcaggacatagtggacctcacgatagcgcggatctaagggggagaccgccaggaagtcctcctcagccagctcacagcaggagacgccagcccaggccagcagcgtggccatggatgccagccgcctggcatccaggtcaaaggcaaagatcttcctagggcagagggcagagcaggggtgagctgagcatgcatggagcagctaagggcctgtcacagctgacacagacaaccagaacatgcaggttaagccaggacacacaatattgaaacagcctatatttaaagggcccagggtcagaggtaactggcctggggtctctgccccaagggctaagggatccacatctcacacctgcagtggggaaagcttagcttggggcaaataccgtgaactactttggtgcagcaggaaagagttaagcgaaagtcatcctttcagccttcattacccactgaaaggcacaaaatcaaaccccatgtcctcctcctcctcctgtggcactcacccttggttcttcagaagagcagccaagtgactggtctttattgcctggggtggcacaggcatccatgacatgggagcctggcgggggtccagcagcatggctgggagacagctggcctggcaggcagaacacaggggccgggtaaacagagaccccaggctaggcccttcccgtgcctacacattcttcccttttctattcctcttgcctaccctgtcctgcagaatgaggtgtccggcccggtacagtgggtgttcatgcagatctgtctgggcgggaaacaccagcagctccggcatcaaggggtccaggagaaaatgcttccccttgagggctcgtaagtcatcgaggctgccagggaagaaccattcattcatcatttcctgaatttctccctgccaggccctatttcaacggtccattcatgcaacaaatgttaccacagctatggagaaatcaacagggtgataagggaatccgggatccgcagttgagggaatgggttgtcaagccagacttatgggtcaggagccccctctactgtttaccagcagtgggagcctgggcaagtgattcaatctcaagccccactggcatctctgtaaaatagtaggtgtgaggattcaatgagccaatatatccaagatacttacgtgccacaatttaataaatgttagctattcctgttgaagcataaccttggagaaaggttactttacaggggggtgaggagtggggaagtgagagctgagctcattcttgatggatgaggagttagtcatgtgaggcgcttaggttaaaactacattcactataactcagtaaagcagtcccgcccactctccgacccatgcagaaataggcctagagagtcacatgtctcagttcagaaatctatcgaagtggcagagctggaattcaaacacaagcagccgttctctgctattccaccctggtgtccaagcaacatggtagggcagaaggaagaggatcttacaaagagtaagggaaagggagaggggcagaggctgcttctcagagccaccaaaggacaaaataagacaggtgtgagcccagtggaggaggcacggggcagagaccagccactgttgctggcacgctggtgcacgtagcactgtggcagatggacctggagaggaagcaggagggacagcacaatggagccaagaaaggacttagcatggccgggcgcggtggttcatgcctgtaatcccagcattttgggaggccaaggtgggcagatcacctgaggtcaggagtttgagaccagcctggccaacatggagaaatcccgtctctactaaaaatacaaaattagccaggcatggtgctgcatgcctgcaatcctgtagggaaaagaaagagagatcagactgttactgtgtctgtgtagaaagggaagacataagaaattccattttgacctgtaccttgaacaattggttggctgagatgctgttaatttgtgactttgccccaaatttgagctcacaaaaacatgtgttgtatggaatcaaggtttaaaggatctagggctgtgcaggacatgccttgttaataaaacgtttacaagc

SEQ ID NO: 494 - DNA, 5388 bp, Homo sapiens
  ref <308>: DATABASE ACCESSION NUMBER: NCBI / NM_005157
  ref <309>: DATABASE ENTRY DATE: 2011-12-24
  ref <313>: RELEVANT RESIDUES IN SEQ ID NO: (1)..(5388)
aaaatgttggagatctgcctgaagctggtgggctgcaaatccaagaaggggctgtcctcgtcctccagctgttatctggaagaagcccttcagcggccagtagcatctgactttgagcctcagggtctgagtgaagccgctcgttggaactccaaggaaaaccttctcgctggacccagtgaaaatgaccccaaccttttcgttgcactgtatgattttgtggccagtggagataacactctaagcataactaaaggtgaaaagctccgggtcttaggctataatcacaatggggaatggtgtgaagcccaaaccaaaaatggccaaggctgggtcccaagcaactacatcacgccagtcaacagtctggagaaacactcctggtaccatgggcctgtgtcccgcaatgccgctgagtatctgctgagcagcgggatcaatggcagcttcttggtgcgtgagagtgagagcagtcctggccagaggtccatctcgctgagatacgaagggagggtgtaccattacaggatcaacactgcttctgatggcaagctctacgtctcctccgagagccgcttcaacaccctggccgagttggttcatcatcattcaacggtggccgacgggctcatcaccacgctccattatccagccccaaagcgcaacaagcccactgtctatggtgtgtcccccaactacgacaagtgggagatggaacgcacggacatcaccatgaagcacaagctgggcgggggccagtacggggaggtgtacgagggcgtgtggaagaaatacagcctgacggtggccgtgaagaccttgaaggaggacaccatggaggtggaagagttcttgaaagaagctgcagtcatgaaagagatcaaacaccctaacctggtgcagctccttggggtctgcacccgggagcccccgttctatatcatcactgagttcatgacctacgggaacctcctggactacctgagggagtgcaaccggcaggaggtgaacgccgtggtgctgctgtacatggccactcagatctcgtcagccatggagtacctggagaagaaaaacttcatccacagagatcttgctgcccgaaactgcctggtaggggagaaccacttggtgaaggtagctgattttggcctgagcaggttgatgacaggggacacctacacagcccatgctggagccaagttccccatcaaatggactgcacccgagagcctggcctacaacaagttctccatcaagtccgacgtctgggcatttggagtattgctttgggaaattgctacctatggcatgtccccttacccgggaattgacctgtcccaggtgtatgagctgctagagaaggactaccgcatggagcgcccagaaggctgcccagagaaggtctatgaactcatgcgagcatgttggcagtggaatccctctgaccggccctcctttgctgaaatccaccaagcctttgaaacaatgttccaggaatccagtatctcagacgaagtggaaaaggagctggggaaacaaggcgtccgtggggctgtgagtaccttgctgcaggccccagagctgcccaccaagacgaggacctccaggagagctgcagagcacagagacaccactgacgtgcctgagatgcctcactccaagggccagggagagagcgatcctctggaccatgagcctgccgtgtctccattgctccctcgaaaagagcgaggtcccccggagggcggcctgaatgaagatgagcgccttctccccaaagacaaaaagaccaacttgttcagcgccttgatcaagaagaagaagaagacagccccaacccctcccaaacgcagcagctccttccgggagatggacggccagccggagcgcagaggggccggcgaggaagagggccgagacatcagcaacggggcactggctttcacccccttggacacagctgacccagccaagtccccaaagcccagcaatggggctggggtccccaatggagccctccgggagtccgggggctcaggcttccggtctccccacctgtggaagaagtccagcacgctgaccagcagccgcctagccaccggcgaggaggagggcggtggcagctccagcaagcgcttcctgcgctcttgctccgcctcctgcgttccccatggggccaaggacacggagtggaggtcagtcacgctgcctcgggacttgcagtccacgggaagacagtttgactcgtccacatttggagggcacaaaagtgagaagccggctctgcctcggaagagggcaggggagaacaggtctgaccaggtgacccgaggcacagtaacgcctccccccaggctggtgaaaaagaatgaggaagctgctgatgaggtcttcaaagacatcatggagtccagcccgggctccagcccgcccaacctgactccaaaacccctccggcggcaggtcaccgtggcccctgcctcgggcctcccccacaaggaagaagctggaaagggcagtgccttagggacccctgctgcagctgagccagtgacccccaccagcaaagcaggctcaggtgcaccagggggcaccagcaagggccccgccgaggagtccagagtgaggaggcacaagcactcctctgagtcgccagggagggacaaggggaaattgtccaggctcaaacctgccccgccgcccccaccagcagcctctgcagggaaggctggaggaaagccctcgcagagcccgagccaggaggcggccggggaggcagtcctgggcgcaaagacaaaagccacgagtctggttgatgctgtgaacagtgacgctgccaagcccagccagccgggagagggcctcaaaaagcccgtgctcccggccactccaaagccacagtccgccaagccgtcggggacccccatcagcccagcccccgttccctccacgttgccatcagcatcctcggccctggcaggggaccagccgtcttccaccgccttcatccctctcatatcaacccgagtgtctcttcggaaaacccgccagcctccagagcggatcgccagcggcgccatcaccaagggcgtggtcctggacagcaccgaggcgctgtgcctcgccatctctaggaactccgagcagatggccagccacagcgcagtgctggaggccggcaaaaacctctacacgttctgcgtgagctatgtggattccatccagcaaatgaggaacaagtttgccttccgagaggccatcaacaaactggagaataatctccgggagcttcagatctgcccggcgacagcaggcagtggtccagcggccactcaggacttcagcaagctcctcagttcggtgaaggaaatcagtgacatagtgcagaggtagcagcagtcaggggtcaggtgtcaggcccgtcggagctgcctgcagcacatgcgggctcgcccatacccgtgacagtggctgacaagggactagtgagtcagcaccttggcccaggagctctgcgccaggcagagctgagggccctgtggagtccagctctactacctacgtttgcaccgcctgccctcccgcaccttcctcctccccgctccgtctctgtcctcgaattttatctgtggagttcctgctccgtggactgcagtcggcatgccaggacccgccagccccgctcccacctagtgccccagactgagctctccaggccaggtgggaacggctgatgtggactgtctttttcatttttttctctctggagcccctcctcccccggctgggcctccttcttccacttctccaagaatggaagcctgaactgaggccttgtgtgtcaggccctctgcctgcactccctggccttgcccgtcgtgtgctgaagacatgtttcaagaaccgcatttcgggaagggcatgcacgggcatgcacacggctggtcactctgccctctgctgctgcccggggtggggtgcactcgccatttcctcacgtgcaggacagctcttgatttgggtggaaaacagggtgctaaagccaaccagcctttgggtcctgggcaggtgggagctgaaaaggatcgaggcatggggcatgtcctttccatctgtccacatccccagagcccagctcttgctctcttgtgacgtgcactgtgaatcctggcaagaaagcttgagtctcaagggtggcaggtcactgtcactgccgacatccctcccccagcagaatggaggcaggggacaagggaggcagtggctagtggggtgaacagctggtgccaaatagccccagactgggcccaggcaggtctgcaagggcccagagtgaaccgtcctttcacacatctgggtgccctgaaagggcccttcccctcccccactcctctaagacaaagtagattcttacaaggccctttcctttggaacaagacagccttcacttttctgagttcttgaagcatttcaaagccctgcctctgtgtagccgccctgagagagaatagagctgccactgggcacctgcgcacaggtgggaggaaagggcctggccagtcctggtcctggctgcactcttgaactgggcgaatgtcttatttaattaccgtgagtgacatagcctcatgttctgtgggggtcatcagggagggttaggaaaaccacaaacggagcccctgaaagcctcacgtatttcacagagcacgcctgccatcttctccccgaggctgccccaggccggagcccagatacgggggctgtgactctgggcagggacccggggtctcctggaccttgacagagcagctaactccgagagcagtgggcaggtggccgcccctgaggcttcacgccgggagaagccaccttcccaccccttcataccgcctcgtgccagcagcctcgcacaggccctagctttacgctcatcacctaaacttgtactttatttttctgatagaaatggtttcctctggatcgttttatgcggttcttacagcacatcacctctttgcccccgacggctgtgacgcagccggagggaggcactagtcaccgacagcggccttgaagacagagcaaagcgcccacccaggtcccccgactgcctgtctccatgaggtactggtcccttccttttgttaacgtgatgtgccactatattttacacgtatctcttggtatgcatcttttatagacgctcttttctaagtggcgtgtgcatagcgtcctgccctgccccctcgggggcctgtggtggctccccctctgcttctcggggtccagtgcattttgtttctgtatatgattctctgtggttttttttgaatccaaatctgtcctctgtagtattttttaaataaatcagtgtttacattagaa

SEQ ID NO: 495 - DNA, 1087 bp, Homo sapiens
  ref <308>: DATABASE ACCESSION NUMBER: NCBI / NM_006325
  ref <309>: DATABASE ENTRY DATE: 2011-12-24
  ref <313>: RELEVANT RESIDUES IN SEQ ID NO: (1)..(1087)
cgcttccgccatctttccagcctcagtcggacgggcgcggagacgcttctggaaggaacgccgcgatggctgcgcagggagagccccaggtccagttcaaacttgtattggttggtgatggtggtactggaaaaacgaccttcgtgaaacgtcatttgactggtgaatttgagaagaagtatgtagccaccttgggtgttgaggttcatcccctagtgttccacaccaacagaggacctattaagttcaatgtatgggacacagccggccaggagaaattcggtggactgagagatggctattatatccaagcccagtgtgccatcataatgtttgatgtaacatcgagagttacttacaagaatgtgcctaactggcatagagatctggtacgagtgtgtgaaaacatccccattgtgttgtgtggcaacaaagtggatattaaggacaggaaagtgaaggcgaaatccattgtcttccaccgaaagaagaatcttcagtactacgacatttctgccaaaagtaactacaactttgaaaagcccttcctctggcttgctaggaagctcattggagaccctaacttggaatttgttgccatgcctgctctcgccccaccagaagttgtcatggacccagctttggcagcacagtatgagcacgacttagaggttgctcagacaactgctctcccggatgaggatgatgacctgtgagaatgaagctggagcccagcgtcagaagtctagttttataggcagctgtcctgtgatgtcagcggtgcagcgtgtgtgccacctcattattatctagctaagcggaacatgtgcttcatctgtgggatgctgaaggagatgagtgggcttcggagtgaatgtggcagtttaaaaaataacttcattgtttggacctgcatatttagctgttttggaacgcagttgattccttgagtttcatatataagactgctgcagtcacatcacaatattcagtggtgaaatcttgtttgttactgtcattcccattccttttcgtttagaatcagaataaagttgtatttcaaatatctaaaaaaaaaaaaaaaaaa

SEQ ID NO: 496 - DNA, 4386 bp, Homo sapiens
  ref <308>: DATABASE ACCESSION NUMBER: NCBI / NM_007245
  ref <309>: DATABASE ENTRY DATE: 2011-11-20
  ref <313>: RELEVANT RESIDUES IN SEQ ID NO: (1)..(4386)
tccgcggtcttctctctccacccccgacaccgcggggctccccccgcccgcccacggcgggccccggctgcccgatccccctcgcttcccgcgctctccagcggggccccagccccggccccctctctccctcccttctctctaattccccttccggacgctgccatcatgttgaagcctcagccgctacaacagccctcccagccccagcagccgccccccacgcaacaggccgtggcccgtcggccccccgggggcaccagccctcccaacggcggcctcccggggccgctggccacctctgcggctcctcccgggcctccagcggccgcctccccctgcctggggcctgtggccgctgccgggagcgggctccgccggggagccgaaggcatcttggcgccgcagccgccgccgccgcagcaacaccaggagaggccgggggcagccgccatcggcagcgccaggggacagagcacaggaaagggacccccacagtcacctgtgtttgaaggcgtctacaacaattccagaatgctgcatttccttacagctgttgtgggctccacttgtgatgtaaaggtgaaaaatggtaccacttatgagggtatcttcaagacgctaagctcaaagtttgaactagccgtggatgctgtgcaccggaaagcatctgagccagcaggtggccctcgtcgggaggacattgtggacaccatggtgtttaagccaagtgatgtcatgcttgttcacttccgaaatgttgacttcaactatgctactaaagacaagttcaccgattcagccattgccatgaactcgaaagtgaatggggaacacaaagagaaggtgcttcagcgctgggaggggggtgacagcaacagcgacgactatgacctcgagtctgacatgtccaatggatgggaccccaatgaaatgttcaagttcaatgaggagaactacggtgtgaagactacctatgatagcagtctttcttcttatacggtgcccttagaaaaggacaactcagaagagtttcgtcagcgagagctgcgtgcggcccagttggctcgagagattgaatcaagcccccagtaccgcctacggatcgccatggagaacgacgatgggcgcactgaagaggagaagcacagtgcagtccagcggcagggctcagggcgggagagccccagcttggcatccagggaggggaagtatatccctctgcctcaacgagtccgggaaggtccccggggaggagttcgatgcagcagctctcggggcggtcggcctggccttagctctttgccacctcgtggccctcaccatctggacaacagcagccctggcccaggttctgaggcccgtggtatcaatggaggcccttcccgcatgtccccaaaggcacagcggcctctgagaggtgccaagactctgtcttcgcccagtaataggccttctggagaaacttctgttccacctcctcctgcagtgggccggatgtatcccccgcgttctcccaagtctgctgcccctgccccaatctcagcttcctgtccagagcctcccatcggctcggcagtgccaacctcttcagcctccatccctgtgacctcatcagtctcagatcctggagtgggctccatttctccagcttctccaaagatctccctggcccccacagatgtaaaagaactctctaccaaggaacctgggagaactctggagccccaggagctggctcggatagctgggaaagtccctggtcttcagaatgaacagaaacgattccaactggaagaactgagaaagtttggggcccagtttaagcttcagcccagtagctcccctgagaacagcctggatccttttcctccccggatcttaaaggaggagcccaaaggaaaggagaaagaggttgatggtctgttgacttcagagcccatggggtctcccgtctcctccaagacagagtccgtatcggataaggaggacaaaccacccctggcaccatcaggaggcactgaggggccagagcagcccccaccaccttgtccaagccaaactggcagccccccggtgggcctcatcaagggagaagacaaagatgagggccctgttgctgaacaagtaaagaaatcaacgttgaaccctaatgctaaggagttcaatcctacaaagcctctgctgtctgtgaataaatccaccagtaccccaacttctccggggccccggactcattcaactccctccatcccggtgctgacagcaggccagagtgggctatacagcccccagtacatctcctacatacctcagatccacatgggaccagctgtgcaggcacctcagatgtatccatatcctgtatccaattcagtgcctgggcagcagggcaagtaccggggagcaaaaggctcccttcctccgcagcgctcggaccaacaccagccagcctcagccccgccgatgatgcaggccgccgcggctgctggcccgcctctggtggctgccacgccctattcttcctacatcccctacaaccctcagcagttcccaggccagccagccatgatgcagcccatggcccactacccctcacagccggtgtttgcccccatgcttcagagcaacccacgcatgctgacgtcgggcagccatccccaggccatcgtgtcatcctctacccctcagtacccttctgcagagcagcctaccccccaagccctttatgccactgttcaccagtcctacccacaccatgccacacagctccatgcccaccagccgcagccggctaccacgcctactggaagccagccgcagtcccagcatgcggcccccagtcctgtccagcatcaggcggggcaggccccacacttgggcagtggacagccacagcagaatctgtaccacccaggggccctgacaggcacgccgccctctctgccaccgggaccttctgcccagtcccctcagagcagcttcccccagccagccgctgtgtatgccatccaccaccagcagctgccccacggcttcaccaacatggcccatgttacccaggcccatgtccaaactggaatcacagcagccccgccccctcaccctggggctccccacccgccccaggtgatgctgctgcacccaccccagagtcatggggggcccccccaaggcgcggtgccccagagtggggtgcctgcactctcagcttccacaccctcaccctacccctacatcggacacccccaaggtgagcagcctggccaggcgcctggatttccaggaggagccgatgacaggattcgtgagttctcattagctgggggaatttggcatggaagagctgaggggctgcaggtggggcaggatgcacgggttctgggtggggagtgaggggtcttggaggcagggctgtcccacagggcgcccgccgacctgcacctgtctgtgaagtatgtagggtgggcagaagccacagtcgccgccgccaggggcttgctcctggctctgtcctttgcttccctccgtcctcgctcagttgtgatccagcagcccccctccccactgcctccccagctctcagtgaccccgactgtctcctgacttagccgaggtaaggtcagtgcagcagacagggccagactggggtgtggggggctgagctgggcacatgagtgagggctctggcttactgggaaacagcgattgacctgtgcttctgacagcccccgagacaccttgaggaggccgctccttcccagacacacccccacgcccccactggacggcattggaggaagggacagctgcttgggttctaatgctcctgctctcttctctttcccctccaaccagttcaatctcatccctcccagcagctccccttccaccccccggggaactgaagattgtcctggccgcgacctgagacctccatgagtggagggaagagtgatctatgtctcttcccccagcagctcggaccactcccagccccccatccccccgttccccaggggagctggggaattcctgccaagcaccttgaatgggaggggcctcacagagggcagggccagggtccagcaggggtggggggttcctgctctgcccctgcccgtccccacccagtcttgccctcccatcctctcatctattcccccgctggagacggaagatcttttattttctattatttataacttcagacttgggccccctgttctttctttcccattaacttgagtgacctgtgtgagagacagacagatgccccacgaggatggctggacaaggacttttactttttattacataaaaatattaaaaaataaataaaaaaaataaaattttaaactaacttaaaaaaaaaaaaaaaaaaaa

SEQ ID NO: 497 - DNA, 1808 bp, Homo sapiens
  ref <308>: DATABASE ACCESSION NUMBER: NCBI / NM_007008
  ref <309>: DATABASE ENTRY DATE: 2011-11-20
  ref <313>: RELEVANT RESIDUES IN SEQ ID NO: (1)..(1808)
agcctagttacagattgcactgcgtcagactgttccacacccagaagacgtcaggtgacttcagtcctgctgcagttgtgcagcagaggagactgcagacttcggttgaggaaacgggtatttcatgtctcagggagtaggtttgtgcagttacagcttttctgttggtatgcataattaataattggagctgcaaagcagatcgtgacaagagatggacggtcagaagaaaaattggaaggacaaggttgttgacctcctgtactggagagacattaagaagactggagtggtgtttggtgccagcctattcctgctgctttcattgacagtattcagcattgtgagcgtaacagcctacattgccttggccctgctctctgtgaccatcagctttaggatatacaagggtgtgatccaagctatccagaaatcagatgaaggccacccattcagggcatatctggaatctgaagttgctatatctgaggagttggttcagaagtacagtaattctgctcttggtcatgtgaactgcacgataaaggaactcaggcgcctcttcttagttgatgatttagttgattctctgaagtttgcagtgttgatgtgggtatttacctatgttggtgccttgtttaatggtctgacactactgattttggctctcatttcactcttcagtgttcctgttatttatgaacggcatcaggcacagatagatcattatctaggacttgcaaataagaatgttaaagatgctatggctaaaatccaagcaaaaatccctggattgaagcgcaaagctgaatgaaaacgcccaaaataattagtaggagttcatctttaaaggggatattcatttgattatacgggggagggtcagggaagaacgaaccttgacgttgcagtgcagtttcacagatcgttgttagatctttatttttagccatgcactgttgtgaggaaaaattacctgtcttgactgccatgtgttcatcatcttaagtattgtaagctgctatgtatggatttaaaccgtaatcatatctttttcctatctatctgaggcactggtggaataaaaaacctgtatattttactttgttgcagatagtcttgccgcatcttggcaagttgcagagatggtggagctagaaaaaaaaaaaaaaaagcccttttcagtttgtgcactgtgtatggtccgtgtagattgatgcagattttctgaaatgaaatgtttgtttagacgagatcataccggtaaagcaggaatgacaaagcttgcttttctggtatgttctaggtgtattgtgacttttactgttatattaattgccaatataagtaaatatagattatatatgtatagtgtttcacaaagcttagacctttaccttccagccaccccacagtgcttgatatttcagagtcagtcattggttatacatgtgtagttccaaagcacataagctagaagaagaaatatttctaggagcactaccatctgttttcaacatgaaatgccacacacatagaactccaacatcaatttcattgcacagactgactgtagttaattttgtcacagaatctatggactgaatctaatgcttccaaaaatgttgtttgtttgcaaatatcaaacattgttatgcaagaaattattaattacaaaatgaagatttataccattgtggtttaagctgtactgaactaaatctgtggaatgcattgtgaactgtaaaagcaaagtatcaataaagcttatagacttaaaaaaaaaaaaaaaaaaaaaaaaaaaaaaa

SEQ ID NO: 498 - DNA, 1400 bp, Homo sapiens
  ref <308>: DATABASE ACCESSION NUMBER: NCBI / NM_006782
  ref <309>: DATABASE ENTRY DATE: 2011-03-10
  ref <313>: RELEVANT RESIDUES IN SEQ ID NO: (1)..(1400)
agagacgtggcagcggagggataatcggggcggccggggctgaagggagaggcgcaggagccctggggagagtggtccctgcccttccgcgcctcgagccatcgctaccgcccttcggaaccagtgcagcggccgatcagtaaacacagagactggggatcgatcatggggctttgtaagtgccccaagagaaaggtgaccaacctgttctgcttcgaacatcgggtcaacgtctgcgagcactgcctggtagccaatcacgccaagtgcatcgtccagtcctacctgcaatggctccaagatagcgactacaaccccaattgccgcctgtgcaacatacccctggccagccgagagacgacccgccttgtctgctatgatctctttcactgggcctgcctcaatgaacgtgctgcccagctaccccgaaacacggcacctgccggctatcagtgccccagctgcaatggccccatcttccccccaaccaacctggctggccccgtggcctccgcactgagagagaagctggccacagtcaactgggcccgggcaggactgggcctccctctgatcgatgaggtggtgagcccagagcccgagcccctcaacacgtctgacttctctgactggtctagttttaatgccagcagtacccctggaccagaggaggtagacagcgcctctgctgccccagccttctacagccaggccccccggcccccagcttccccaggccggcccgagcagcacacagtgatccacatgggcaatcctgagcccttgactcacgcccctaggaaggtgtatgatacgcgggatgatgaccggacaccaggcctccatggagactgtgacgatgacaagtaccgacgtcggccggccttgggttggctggcccggctgctaaggagccgggctgggtctcggaagcggccgctgaccctgctccagcgggcggggctgctgctactcttgggactgctgggcttcctggccctccttgccctcatgtctcgcctaggccgggccgcagctgacagcgatcccaacctggacccactcatgaaccctcacatccgcgtgggcccctcctgagcccccttgcttgtggctaggccagcctaggatgtgggttctgtggaggagaggcggggtaatggggaggctgagggcacctcttcactgcccctctccctcaagcctaagacactaagaccccagacccaaagccaagtccaccagagtggctgcaggccaggcctggagtccccgtgggtcaagcatttgtcttgacttgctttcctcccgggtctccagcctccgacccctcgccccatgaaggagctggcaggtggaaataaacaacaactttattaaaacaccaaaaaaaaaaaaaa

SEQ ID NO: 499 - DNA, 1574 bp, Homo sapiens
  ref <308>: DATABASE ACCESSION NUMBER: NCBI / NM_006694
  ref <309>: DATABASE ENTRY DATE: 2011-12-24
  ref <313>: RELEVANT RESIDUES IN SEQ ID NO: (1)..(1574)
acacagcttctccactggatcatcggtggcgatgaaggggcggctggggaaggatgtcagagaaaccagaagcttgacggtgaatcctcgggttttaaggagagagcaaagtcctgagagggcgacgtattgtccctgctcacctagcccagaatgaacaaacacgcgccagccagggagcagcgagccgagaattcggacgagcctctgcaaccgccatttgccgttctcgcaaagactaccaagaccacaatgcaacggggcgccgagctaattcccagtgagcagcaggcgaggcgccaccgacgcggaagactataagccccagcgggcgacgaccgaacgcccccgggaacaccgggccccgagctcggtcccgcgcccgaggatcctccacggggctagatggctgcgtcgggggcgggagcggaggtgagcgggcgctagggccgcgagcccccgccggcccttcctccagcgccctgcggaccccgcagaaggcgctcgcctccctagcccgcaaaaacatatcgatttttctcgctgtggcaacggggacgtcctgatagatcctctgctccaataggcaactccggccttccctgccctgacctggaacctctgggagggctgcagagtaagtgccgcctctgcgctccgacggaggcacgaggcctgtggagtaggtccctctgttccgacaggtgcgacacttggcgctccatgcttgcgggtgccgggaggcctggcctcccccagggccgccacctctgctggttgctctgtgctttcaccttaaagctctgccaagcagaggctcccgtgcaggaagagaagctgtcagcaagcacctcaaatttgccatgctggctggtggaagagtttgtggtagcagaagagtgctctccatgctctaatttccgggctaaaactacccctgagtgtggtcccacaggatatgtagagaaaatcacatgcagctcatctaagagaaatgagttcaaaagctgccgctcagctttgatggaacaacgcttattttggaagttcgaaggggctgtcgtgtgtgtggccctgatcttcgcttgtcttgtcatcattcgtcagcgacaattggacagaaaggctctggaaaaggtccggaagcaaatcgagtccatatagctacattccacccttgtatcctgggtcttagagaccctatctcagacagtgaaagtgaaatggactgatttgcactcttggttctttggagccttgtggtggaatccccttttccccatcttcttctttcagatcattaatgagcagaataaaaagagtaaaatggtttccttcccttctgtaacttggagcaggaagtcatgggggcagagagggaaaggaggtggttacttaaggccccaatctaccaagtcttccccaccacttctcccttgttttccccctcttctactacttatttcaaacttctgggatacaatttcagctaaaacgtttatttctcactcaaaacttatttcccctcaaccctatacccaaagaagaaataaaatcacagatacataacagaa

SEQ ID NO: 500 - DNA, 2410 bp, Homo sapiens
  ref <308>: DATABASE ACCESSION NUMBER: NCBI / NM_006703
  ref <309>: DATABASE ENTRY DATE: 2011-11-28
  ref <313>: RELEVANT RESIDUES IN SEQ ID NO: (1)..(2410)
ggtgcagccttacgccgctgacgcatcgcgcccaagatggcggcgcggtcgtcgtcgggggtggcggcggcagagggggcggcggccctggcggcagcggagacggcagccgtgacggtggcagcggcggcgcgggacctgggcctgggggaatgaggcggccgcggcgggccagcggcggagccgtgtagcggagaagctccccctccctgcttcccttggccgagccgggggcgcgcgcgcacgcggccgtccagagcgggctccccacccctcgactcctgcgacccgcaccgcacccccacccgggcccggaggatgatgaagctcaagtcgaaccagacccgcacctacgacggcgacggctacaagaagcgggccgcatgcctgtgtttccgcagcgagagcgaggaggaggtgctactcgtgagcagtagtcgccatccagacagatggattgtccctggaggaggcatggagcccgaggaggagccaagtgtggcagcagttcgtgaagtctgtgaggaggctggagtaaaagggacattgggaagattagttggaatttttgagaaccaggagaggaagcacaggacgtatgtctatgtgctcattgtcactgaagtgctggaagactgggaagattcagttaacattggaaggaagagggaatggtttaaaatagaagacgccataaaagtgctgcagtatcacaaacccgtgcaggcatcatattttgaaacattgaggcaaggctactcagccaacaatggcaccccagtcgtggccaccacatactcggtttctgctcagagctcgatgtcaggcatcagatgactgaagacttcctgtaagagaaatggaaattggaaactagactgaagtgcaaatcttccctctcaccctggctctttccacttctcacaggcctcctctttcaaataaggcatggtgggcagcaaagaaagggtgtattgataatgttgctgtttggtgttaagtgatggggctttttcttctgtttttattgagggtgggggttgggtgtgtaatttgtaagtacttttgtgcatgatctgtccctccctcttcccacccctgcagtcctctgaagagaggccaacagccttcccctgccttggattctgaagtgttcctgtttgtcttatcctggccctggccagacgttttctttgatttttaattttttttttttattaaaagataccagtatgagatgaaaacttccaataatttgtcctataatgtgctgtacagttcagtagagtggtcactttcactgcagtatacatttatctacacattatatatcggacatataatatgtaaataaatgacttctagaaagagaaatttgtttaatttttcaaggtttttttctcttttaatttgggcatttctagaattgagagcctcacaattaacatacctttttgttttcgatgctagtggctgggcaggttgccctgtcctttctctatttcccagtcattgactgtagatatgggaagagtttagctaccttcatagtgctcccaggactcatggcctttccttctttaagctgtatttccctgcccagaaagaaacaggaagaaacctttttttatttttttatttttttttaaccaagcaaggagcaaatggcctcagcccagatctgtaaaaacaatgatagaaattgaattctgccccacatgttgacagtagagttggaactggattcttgggattacttatctaaaaaactggagcatcaggtccatttctgttctgctggtttggaatcttttccgtaatgctatttattgccaacaatggcctctctttgtgtccatatatgccttacaccgtgctgacctgggtatcatccatgtgctctgaagcatccaactttactttgcaggtgcatcaatgtagtcctgtccctgaactgagtaaccgtgttcctgaaaagtacactagggaaattcacctgcttgcttgtctttgtattggcatggcacttgtgattgcaccatggagcatgctcagagctattaaattggtctcccatctcccaccaggatatgaaaggtccatatgggaggccacgtaatcacttattacagtggttacataatacactggctcactgcagactctcttgttttttgatacagtttcgtgctggcttcatttgccaattgtgttgtttagttcggaagtaagagggtcttgagattgaggggtagggagggctacactgactgatccgtggcttaagacaggagattatctctgtactccagtggcatctccttagccaagatgtgaaattaaaatcatagttcgcctcatttaaaaattctaataaagcactcaaactttgaaaaaaaaaaaaaaaaaa

SEQ ID NO: 501 - DNA, 2018 bp, Homo sapiens
  ref <308>: DATABASE ACCESSION NUMBER: NCBI / NM_006032
  ref <309>: DATABASE ENTRY DATE: 2011-08-13
  ref <313>: RELEVANT RESIDUES IN SEQ ID NO: (1)..(2018)
gccggagctggagccggcgccagcggctggagcagcaagggagtcagggccagggccagagagccggagagaggagcccccgaccgagagcccagtgacatgtcggaccctgagatgggatgggtgcctgagcccccaaccatgacgctgggggcctctcgggtggagctgcgggtgtcctgccatggcctcctggaccgggacacactcaccaaaccccacccctgcgtgctgctcaagctctactctgatgagcagtgggtggaggtagagcgcacagaggtgcttcgctcctgttccagccctgtcttctcccgggtgctggcccttgagtatttttttgaggagaagcagcccctgcagttccacgtgttcgatgccgaggacggagccaccagcccccgaaatgataccttcctcggctctacggagtgcaccttgggccagattgtgtcacaaaccaaggtcactaagccattattgctgaagaatgggaagactgcgggcaagtccaccatcacgatcgtggccgaggaggtatcaggcacaaacgactatgtgcaactcaccttcagagcctacaagctggacaacaaggatctgttcagcaagtctgaccctttcatggaaatctataagaccaacgaggaccaaagtgatcagctggtctggagaactgaggtggtgaagaacaacctgaaccccagctgggagccgttccgcctgtccctgcattccctatgcagctgtgatgttcaccgacctctcaagttcctggtgtatgactatgactccagtgggaagcatgacttcatcggcgagttcaccagcactttccaggagatgcaggaagggacggcaaaccctgggcaggagatgcagtgggactgtatcaaccccaagtatcgggacaagaagaagaattacaagagctcagggacggtagtgctggcccagtgcacggtggagaaggtgcacaccttcctggattacatcatgggtggctgccagatcagcttcacggtggccattgacttcactgcctccaatggggacccgaggagcagccagtccctgcactgcctcagtccccgacagcccaaccactacctgcaggccctgcgtgcagtgggaggcatctgccaggactatgacagtgataagcggttcccagcttttggctttggggctcgaatcccccccaacttcgaggtgtcccatgactttgctatcaactttgacccggaaaatcctgaatgtgaagagatctcaggggtcatcgcctcctaccgtcgttgcctgccccagatccagctctacggccccaccaatgtggcccccatcatcaaccgtgtggctgagccggcccagcgggagcagagcaccggccaagccacgaagtactcggtgctgctggtgctcactgacggtgtggtgagcgacatggctgagactcgcactgctatcgtgcgtgcctcccgcctgcccatgtccatcatcatcgtaggcgtgggcaatgctgacttctctgacatgcggctgctggatggcgacgacggccccttgcgctgcccccgaggggtgcctgcagcccgagacattgtccagttcgtgcccttccgagacttcaaggatgctgccccctctgcactcgccaagtgtgtcctggctgaggtgccacggcaggtggtggagtactacgccagccagggcatcagccctggggctcccaggccctgcacactggctacgactcccagccctagcccgtgactgcctccctccggaccgacactccctcagcctctcagtgcctgtcctgaccctcgtgactccagtgaccaatgcctccacctcttggaccaggtgtgccccctgggttctggacgtgagtggtgggtcctgctcctatctctccaaaccccatacccttcaatgctgtggcccctcagtgacttccttgggtgatcctgactttctagccattaataaagagaactgctcctagcaaaaaaaaa

SEQ ID NO: 502 - DNA, 1877 bp, Homo sapiens
  ref <308>: DATABASE ACCESSION NUMBER: NCBI / NM_012227
  ref <309>: DATABASE ENTRY DATE: 2011-11-09
  ref <313>: RELEVANT RESIDUES IN SEQ ID NO: (1)..(1877)
atgtgggccctgcgggccgccgtacgcccggggctgcggctctcccgcgtgggccgcggccgctcggctccgcgggcagccgcgccgtcctgccccgcgcgcgcgctagccgctgtcggccgcaggagccccgggaatctggaggggccgtggggcggagggcggggcctgcgggcggacggcggccgaagccgcacgggagacgacgaggaggagccggaagatgcggacgagaacgccgaggaggagctgctgcggggagagcctctgctgccggcggggacccagcgcgtgtgtctggttcaccctgacgtcaagtggggcccggggaagtcgcagatgactcgagccgagtggcaggtggcggaggccacagcgctggtgcacacgctggacggctggtccgtggtgcagacaatggtcgtgtccaccaaaacgccggacaggaagctcatctttggcaaagggaactttgagcacctgacagaaaagatccgagggtctccagacgtcacgtgcgtcttcctgaacgtggagaggatggctgccccgaccaagaaagaactggaagccgcctggggcgtggaggtgtttgaccgcttcacggtcgtcctgcacatcttccgctgtaacgcccgcacgaaggaggcccggcttcaggtggccctggcggagatgccgctgcacaggtcgaacttgaaaagggacgtcgcccacctgtaccgaggagtcggctcgcgctacatcatggggtcaggagaatccttcatgcagctgcagcagcgtctcctgagagagaaggaggccaagatcaggaaggccttggacaggcttcgcaagaagaggcacctgctccgccggcagcggacgaggcgggagttccccgtgatctccgtggtggggtacaccaactgcggaaagaccacgctgatcaaggcactgacgggcgatgccgccatccagccacgggaccagctgtttgccacgctggacgtcacggcccacgcgggcacgctgccctcacgcatgaccgtcctgtacgtggacaccatcggcttcctctcccagctgccgcacggcctcatcgagtccttctccgccaccctggaagacgtggcccactcggatctcatcttgcacgtgagggacgtcagccaccccgaggcggagctccagaaatgcagcgttctgtccacgctgcgtggcctgcagctgcccgccccgctcctggactccatggtggaggttcacaacaaggtggacctcgtgcccgggtacagccccacggaaccgaacgtcgtgcccgtgtctgccctgcggggccacgggctccaggagctgaaagctgagctcgatgcggcggttttgaaggcgacggggagacagatcctcactctccgtgtgaggctcgcaggggcgcagctcagctggctgtataaggaggccacagttcaggaggtggacgtgatccctgaggacggggcggccgacgtgagggtcatcatcagcaactcagcctacggcaaattccggaagctctttccaggatgaacggacgcccacagaggcctgcggggtgggggcatcgctgcctggggagctgaggcgttaccgctgtgttgggggcagcttggtgtcaggtgcagcagggtcctccttgtctggttctgcacccgtctcgctcccagccatttgctgggatgaccgtgcaggccggtgacacggccgcacctgccccaaagcgggccgcccgagcgtccactccaagcctgagcatccacacaattccagtgggccctcggtgcctgctgtgaactgctttccctcggaatgtttccgtaacaggacattaaacctttgattttaaaaaaaaaaaa

SEQ ID NO: 503 - DNA, 1398 bp, Homo sapiens
  ref <308>: DATABASE ACCESSION NUMBER: NCBI / NM_014604
  ref <309>: DATABASE ENTRY DATE: 2011-11-28
  ref <313>: RELEVANT RESIDUES IN SEQ ID NO: (1)..(1398)
ggcgctccggccagtgattggctggaggtttgttaactattcatgagggggcgggccgagcggggcggcctttgttaagcagcgagggcgcgaccgcgggtactctgctgccggcttctcggagcggcgctgggcgaccagagcagggtcgagatgtcctacatcccgggccagccggtcaccgccgtggtgcaaagagttgaaattcacaagctgcgtcaaggtgagaacttaatcctgggtttcagcattggaggtggaatcgaccaggatccttcccagaatcccttctctgaagacaagacggacaagggtatttatgtcacacgggtgtctgaaggaggccctgctgaaatcgctgggctgcagattggagacaagatcatgcaggtgaacggctgggacatgaccatggtcacacacgaccaggcccgcaagcggctcaccaagcgctcggaggaggtggtgcgtctgctggtgacgcggcagtcgctgcagaaggccgtgcagcagtccatgctgtcctagcagccaccaccatctgcgactcctgcctgccgcctctctgtacagtaacgccacttccacactctgtccccatctggcttctgctgaccgctgggccccagctcagaagggctatagctggtcccagaggcctggcctggccttccttcccttctcccatccctggcctggggcctctgggaccggctttctctcctggacaccgaggattggaaataagggcctggagctgagtagtagccagtctgctgtgaccacaggctcaggtccgaccctgctgcttggccacagcagtggctgggcaagtgggaaccactatctcttgggagcccccaaaagctgggaaatgctggaggaaccaggcctttcccgcttttgcctggctgcagggttcggctccgcccctgccccccagccctcgtgtgtccacaccgcagtgcctctgcccctcgggggactggacacacatcctgccagaggcgctacgaagctttgcccagatgaagccaggtgggctccgcgttcactcccactctcccgaggggtgctggcctccccagggtttgccttcttacggatttagacgaggttcgaggctcacctatcagggcagctctcaggattgtcattttcctctttgcctgtgggtttaacttttgtatttttttaatcacaagtttgatacaaaatgtttttatcgtactctttggagatgcccattctacttttgaatttagcttttactaattcgcatctggaagctcagcaagtgcacaagccttactttggttaccgtggaaaccactgccgcccctccccgatgtggtgcgctcaataaaaatgctggaattcacaaaaaaaaaaaaaaaa

SEQ ID NO: 504 - DNA, 2426 bp, Homo sapiens
  ref <308>: DATABASE ACCESSION NUMBER: NCBI / NM_021642
  ref <309>: DATABASE ENTRY DATE: 2011-12-25
  ref <313>: RELEVANT RESIDUES IN SEQ ID NO: (1)..(2426)
ctcttttctaagcttgtctcttaaaacccactggacgttggcacagtgctgggatgactatggagacccaaatgtctcagaatgtatgtcccagaaacctgtggctgcttcaaccattgacagttttgctgctgctggcttctgcagacagtcaagctgctcccccaaaggctgtgctgaaacttgagcccccgtggatcaacgtgctccaggaggactctgtgactctgacatgccagggggctcgcagccctgagagcgactccattcagtggttccacaatgggaatctcattcccacccacacgcagcccagctacaggttcaaggccaacaacaatgacagcggggagtacacgtgccagactggccagaccagcctcagcgaccctgtgcatctgactgtgctttccgaatggctggtgctccagacccctcacctggagttccaggagggagaaaccatcatgctgaggtgccacagctggaaggacaagcctctggtcaaggtcacattcttccagaatggaaaatcccagaaattctcccatttggatcccaccttctccatcccacaagcaaaccacagtcacagtggtgattaccactgcacaggaaacataggctacacgctgttctcatccaagcctgtgaccatcactgtccaagtgcccagcatgggcagctcttcaccaatggggatcattgtggctgtggtcattgcgactgctgtagcagccattgttgctgctgtagtggccttgatctactgcaggaaaaagcggatttcagccaattccactgatcctgtgaaggctgcccaatttgagccacctggacgtcaaatgattgccatcagaaagagacaacttgaagaaaccaacaatgactatgaaacagctgacggcggctacatgactctgaaccccagggcacctactgacgatgataaaaacatctacctgactcttcctcccaacgaccatgtcaacagtaataactaaagagtaacgttatgccatgtggtcatactctcagcttgctgagtggatgacaaaaagaggggaattgttaaaggaaaatttaaatggagactggaaaaatcctgagcaaacaaaaccacctggcccttagaaatagctttaactttgcttaaactacaaacacaagcaaaacttcacggggtcatactacatacaagcataagcaaaacttaacttggatcatttctggtaaatgcttatgttagaaataagacaaccccagccaatcacaagcagcctactaacatataattaggtgactagggactttctaagaagatacctacccccaaaaaacaattatgtaattgaaaaccaaccgattgcctttattttgcttccacattttcccaataaatacttgcctgtgacattttgccactggaacactaaacttcatgaattgcgcctcagatttttcctttaacatcttttttttttttgacagagtctcaatctgttacccaggctggagtgcagtggtgctatcttggctcactgcaaacccgcctcccaggtttaagcgattctcatgcctcagcctcccagtagctgggattagaggcatgtgccatcatacccagctaatttttgtattttttattttttttttttagtagagacagggtttcgcaatgttggccaggccgatctcgaacttctggcctctagcgatctgcccgcctcggcctcccaaagtgctgggatgaccagcatcagccccaatgtccagcctctttaacatcttctttcctatgccctctctgtggatccctactgctggtttctgccttctccatgctgagaacaaaatcacctattcactgcttatgcagtcggaagctccagaagaacaaagagcccaattaccagaaccacattaagtctccattgttttgccttgggatttgagaagagaattagagaggtgaggatctggtatttcctggactaaattccccttggggaagacgaagggatgctgcagttccaaaagagaaggactcttccagagtcatctacctgagtcccaaagctccctgtcctgaaagccacagacaatatggtcccaaatgactgactgcaccttctgtgcctcagccgttcttgacatcaagaatcttctgttccacatccacacagccaatacaattagtcaaaccactgttattaacagatgtagcaacatgagaaacgcttatgttacaggttacatgagagcaatcatgtaagtctatatgacttcagaaatgttaaaatagactaacctctaacaacaaattaaaagtgattgtttcaaggtgatgcaattattgatgacctattttatttttctataatgatcatatattacctttgtaataaaacattataaccaaaaca

SEQ ID NO: 505 - DNA, 1890 bp, Homo sapiens
  ref <308>: DATABASE ACCESSION NUMBER: NCBI / NM_005354
  ref <309>: DATABASE ENTRY DATE: 2011-12-18
  ref <313>: RELEVANT RESIDUES IN SEQ ID NO: (1)..(1890)
aggagccgccgccagtggagggccgggcgctgcggccgcggccggggcgggcgcagggccgagcggacgggggggcgcgggccccccgggaggccgcggccactcccccccgggccggcgcggcgggggaggcggaggatggaaacacccttctacggcgatgaggcgctgagcggcctgggcggcggcgccagtggcagcggcggcagcttcgcgtccccgggccgcttgttccccggggcgcccccgacggccgcggccggcagcatgatgaagaaggacgcgctgacgctgagcctgagtgagcaggtggcggcagcgctcaagcctgcggccgcgccgcctcctacccccctgcgcgccgacggcgcccccagcgcggcaccccccgacggcctgctcgcctctcccgacctggggctgctgaagctggcctcccccgagctcgagcgcctcatcatccagtccaacgggctggtcaccaccacgccgacgagctcacagttcctctaccccaaggtggcggccagcgaggagcaggagttcgccgagggcttcgtcaaggccctggaggatttacacaagcagaaccagctcggcgcgggcgcggccgctgccgccgccgccgccgccgccggggggccctcgggcacggccacgggctccgcgccccccggcgagctggccccggcggcggccgcgcccgaagcgcctgtctacgcgaacctgagcagctacgcgggcggcgccgggggcgcggggggcgccgcgacggtcgccttcgctgccgaacctgtgcccttcccgccgccgccacccccaggcgcgttggggccgccgcgcctggctgcgctcaaggacgagccacagacggtgcccgacgtgccgagcttcggcgagagcccgccgttgtcgcccatcgacatggacacgcaggagcgcatcaaggcggagcgcaagcggctgcgcaaccgcatcgccgcctccaagtgccgcaagcgcaagctggagcgcatctcgcgcctggaagagaaagtgaagaccctcaagagtcagaacacggagctggcgtccacggcgagcctgctgcgcgagcaggtggcgcagctcaagcagaaagtcctcagccacgtcaacagcggctgccagctgctgccccagcaccaggtgcccgcgtactgagtccgcgcgcggggcgcatgcgcggccaccctccccaaggggcgggctcgcgggggggtgtcgtgggcgccccggacttggagagggtgcggccctggggaccccccctccccgagtgtgcccaggaactcagagagggcgcggcccccggggattccccccccccgagggtgcccaggactcgacaagctggaccccctgctcccgggggggcgagcgcatgacccccccgccctcgcgctgcctctttcccccgcgcggccgccccgtgttgcacaaacccgcgcgtctcggctgcccctttgtacaccgcgccgcggaagggggctccgagggggcgcagcctcaaaccctgcctttcctttacttttacttttttttttttttctttggaagagagaagaacagagtgttcgattctgccctatttatgtttctactcgggaacaaacgttggttgtgtgtgtgtgtgttttcttgtgttggttttttaaagaaatgggaagaagaaaaaaaaattctccgcccctttcctcgatctcgctccccccttcggttctttcgaccggtcccccctcccttttttgttctgttttgttttgttttgctacgagtccacattcctgtttgtaatccttggttcgcccggttttctgttttcagtaaagtctcgttacgccagctcggcaaaaaaaaaaaaaaaaaaaa

SEQ ID NO: 506 - DNA, 1579 bp, Homo sapiens
  ref <308>: DATABASE ACCESSION NUMBER: NCBI / NM_020529
  ref <309>: DATABASE ENTRY DATE: 2011-12-24
  ref <313>: RELEVANT RESIDUES IN SEQ ID NO: (1)..(1579)
agcccacagcagtccgtgccgccgtcccgcccgccagcgccccagcgaggaagcagcgcgcagcccgcggcccagcgcacccgcagcagcgcccgcagctcgtccgcgccatgttccaggcggccgagcgcccccaggagtgggccatggagggcccccgcgacgggctgaagaaggagcggctactggacgaccgccacgacagcggcctggactccatgaaagacgaggagtacgagcagatggtcaaggagctgcaggagatccgcctcgagccgcaggaggtgccgcgcggctcggagccctggaagcagcagctcaccgaggacggggactcgttcctgcacttggccatcatccatgaagaaaaggcactgaccatggaagtgatccgccaggtgaagggagacctggccttcctcaacttccagaacaacctgcagcagactccactccacttggctgtgatcaccaaccagccagaaattgctgaggcacttctgggagctggctgtgatcctgagctccgagactttcgaggaaatacccccctacaccttgcctgtgagcagggctgcctggccagcgtgggagtcctgactcagtcctgcaccaccccgcacctccactccatcctgaaggctaccaactacaatggccacacgtgtctacacttagcctctatccatggctacctgggcatcgtggagcttttggtgtccttgggtgctgatgtcaatgctcaggagccctgtaatggccggactgcccttcacctcgcagtggacctgcaaaatcctgacctggtgtcactcctgttgaagtgtggggctgatgtcaacagagttacctaccagggctattctccctaccagctcacctggggccgcccaagcacccggatacagcagcagctgggccagctgacactagaaaaccttcagatgctgccagagagtgaggatgaggagagctatgacacagagtcagagttcacggagttcacagaggacgagctgccctatgatgactgtgtgtttggaggccagcgtctgacgttatgagcgcaaaggggctgaaagaacatggacttgtatatttgtacaaaaaaaaagttttatttttctaaaaaaagaaaaaagaagaaaaaatttaaagggtgtacttatatccacactgcacactgcctggcccaaaacgtcttattgtggtaggatcagccctcattttgttgcttttgtgaactttttgtaggggacgagaaagatcattgaaattctgagaaaacttcttttaaacctcacctttgtggggtttttggagaaggttatcaaaaatttcatggaaggaccacattttatatttattgtgcttcgagtgactgaccccagtggtatcctgtgacatgtaacagccaggagtgttaagcgttcagtgatgtggggtgaaaagttactacctgtcaaggtttgtgttaccctcctgtaaatggtgtacataatgtattgttggtaattattttggtacttttatgatgtatatttattaaacagatttttacaaatgaaaaaaaaaaaaa

SEQ ID NO: 507 - DNA, 2560 bp, Homo sapiens
  ref <308>: DATABASE ACCESSION NUMBER: NCBI / NM_005561
  ref <309>: DATABASE ENTRY DATE: 2011-11-19
  ref <313>: RELEVANT RESIDUES IN SEQ ID NO: (1)..(2560)
tgcggggagccgagccgccggcgctcgacgcgcgcgctctcgcgagacccgcgggatcacgtgacgcccgggcgcggcgcagctcacgtgacaagcgctgccggccgcggtgtcttcttcgtgccggcgtcgcagtggccgggcctcttgcgtctggtaacgccgctgtctctaacgccagcccttggcgcccgcgccccgccaccgcagcgcccggcagtccgcggcccaaccgccgcccgcgcccccgctccccgcaccgtacccggccgcctcgcgccatggcggcccccggcagcgcccggcgacccctgctgctgctactgctgttgctgctgctcggcctcatgcattgtgcgtcagcagcaatgtttatggtgaaaaatggcaacgggaccgcgtgcataatggccaacttctctgctgccttctcagtgaactacgacaccaagagtggccctaagaacatgacctttgacctgccatcagatgccacagtggtgctcaaccgcagctcctgtggaaaagagaacacttctgaccccagtctcgtgattgcttttggaagaggacatacactcactctcaatttcacgagaaatgcaacacgttacagcgtccagctcatgagttttgtttataacttgtcagacacacaccttttccccaatgcgagctccaaagaaatcaagactgtggaatctataactgacatcagggcagatatagataaaaaatacagatgtgttagtggcacccaggtccacatgaacaacgtgaccgtaacgctccatgatgccaccatccaggcgtacctttccaacagcagcttcagcaggggagagacacgctgtgaacaagacaggccttccccaaccacagcgccccctgcgccacccagcccctcgccctcacccgtgcccaagagcccctctgtggacaagtacaacgtgagcggcaccaacgggacctgcctgctggccagcatggggctgcagctgaacctcacctatgagaggaaggacaacacgacggtgacaaggcttctcaacatcaaccccaacaagacctcggccagcgggagctgcggcgcccacctggtgactctggagctgcacagcgagggcaccaccgtcctgctcttccagttcgggatgaatgcaagttctagccggtttttcctacaaggaatccagttgaatacaattcttcctgacgccagagaccctgcctttaaagctgccaacggctccctgcgagcgctgcaggccacagtcggcaattcctacaagtgcaacgcggaggagcacgtccgtgtcacgaaggcgttttcagtcaatatattcaaagtgtgggtccaggctttcaaggtggaaggtggccagtttggctctgtggaggagtgtctgctggacgagaacagcatgctgatccccatcgctgtgggtggtgccctggcggggctggtcctcatcgtcctcatcgcctacctcgtcggcaggaagaggagtcacgcaggctaccagactatctagcctggtgcacgcaggcacagcagctgcaggggcctctgttcctttctctgggcttagggtcctgtcgaaggggaggcacactttctggcaaacgtttctcaaatctgcttcatccaatgtgaagttcatcttgcagcatttactatgcacaacagagtaactatcgaaatgacggtgttaattttgctaactgggttaaatattttgctaactggttaaacattaatatttaccaaagtaggattttgagggtgggggtgctctctctgagggggtgggggtgccgctgtctctgaggggtgggggtgccgctgtctctgaggggtgggggtgccgctctctctgagggggtgggggtgccgctttctctgagggggtgggggtgccgctctctctgagggggtgggggtgctgctctctccgaggggtggaatgccgctgtctctgaggggtgggggtgccgctctaaattggctccatatcatttgagtttagggttctggtgtttggtttcttcattctttactgcactcagatttaagccttacaaagggaaagcctctggccgtcacacgtaggacgcatgaaggtcactcgtggtgaggctgacatgctcacacattacaacagtagagagggaaaatcctaagacagaggaactccagagatgagtgtctggagcgcttcagttcagctttaaaggccaggacgggccacacgtggctggcggcctcgttccagtggcggcacgtccttgggcgtctctaatgtctgcagctcaagggctggcacttttttaaatataaaaatgggtgttatttttatttttttttgtaaagtgatttttggtcttctgttgacattcggggtgatcctgttctgcgctgtgtacaatgtgagatcggtgcgttctcctgatgttttgccgtggcttggggattgtacacgggaccagctcacgtaatgcattgcctgtaacaatgtaataaaaagcctctttcttttaaaaaaaaaaaaaaaaaaaa

SEQ ID NO: 508 - DNA, 5794 bp, Homo sapiens
  ref <308>: DATABASE ACCESSION NUMBER: NCBI / NM_014774
  ref <309>: DATABASE ENTRY DATE: 2011-11-09
  ref <313>: RELEVANT RESIDUES IN SEQ ID NO: (1)..(5794)
cgccgccgcagccgccgccaccaacgccaacaacaacgtgtcgggagcagccgcggccgaagccggagcaggggccggagtcgcggctggagtggggcctgcgcgtgtgagtggccgagagttgcccgtgccggagacctcaaactccgggcgggagcgctttcggtcggccgagccgccgtcgcccgcggcaccgtgtccccaaggcccagacagcggggcgggggtctatcaggcgcgggactggcttctctcaggccgacccttctagccgggctccggatcttcctcggcctcgggcccccttcacgttcaggacggaggccggagaacggtgatcatcacacaccccagccggcttcctggccagggcattttctctgcggccaagcagtgttgggattgtagctgctgggagccccctcctgccgccacctctcctgcaaggaagggactgacgcgttcccactttcttactctgcacctccccactctcttcccattcaagaacgagtttctcttccctctccattggaaatcttgctccggaggtccgaaacacgtattttaagcgtgcccttcctcacctcctggagcacccttagaagtattgcctacttatccgggctgagaatccttcatttttgacctggcttttttttcgccctttgggagataaaggtccctctccaccctctactaacactctgcacccaaggccttatcctttggggtcaccagctccttggccatttctatgtgatttcccccacccatctgagttccagtttcctctgggctccaatctccagtccctggcggatctggtcagtcccacccctaggtgggagtgaccagggggctctggcccaggattcccaaccctggaaggcagctccaaggcaggaagagaattgggcatcgggtacgaacctggcagctcaggagtcggggctccactcaccccacacaaaaagatgaaaaagcgcaaagagctcaatgcattgattggtttggctggggacagccggagaaagaagcccaagaaaggcccaagcagtcaccgcctgcttcgcactgagcctcccgactcagactctgagtccagctccgaagaggaagaggaattcggtgtggttggaaatcgctctcgctttgccaagggagactatttacgatgctgcaagatctgttatccgctctgtggttttgtcatccttgctgcctgtgttgtggcctgtgttggcttggtgtggatgcaggttgctctcaaggaggatctggatgccctcaaggaaaaatttcgaacaatggaatctaatcagaaaagctcattccaagaaatccccaaacttaatgaagaactactcagcaagcaaaaacaacttgagaagattgaatctggagagatgggtttgaacaaagtctggataaacatcacagaaatgaataagcagatttctctgttgacttctgcagtgaaccacctcaaagccaatgttaagtcagctgcagacttgattagcctgcctaccactgtagagggacttcagaagagtgtagcttccattggcaatactttaaacagcgtccatcttgctgtggaagcactacagaaaactgtggatgaacacaagaaaacgatggaattactgcagagtgatatgaatcagcacttcttgaaggagactcctggaagcaaccagatcattccgtcaccttcagccacatcagaacttgacaataaaacccacagtgagaatttgaaacaggatatcctgtaccttcacaactctttagaggaggtaaacagtgccctagtggggtaccagagacagaatgatcttaaactcgagggaatgaacgagacagtcagtaatcttacccagagagtcaacctgatagaaagcgatgtggttgctatgagcaaggtagaaaagaaagcaaacctgtccttcagcatgatgggtgatagatctgccactctgaaaagacagtctttggatcaagtcaccaacagaacagatacagtaaaaatccaaagcataaagaaagaagatagttcaaattctcaggtatccaagctaagagagaaactccagctgatcagtgctcttacaaacaaacctgagagcaacaggcctccagagaccgccgatgaagagcaagtagagagtttcacatcaaagccatcagcattgccaaaattttcacagtttcttggagacccagttgagaaagctgcccaactaagacctatctccctaccaggagtttctagcactgaagatcttcaggatttattccgcaagactggccaggacgtggatgggaagctgacctaccaggaaatctggacctccctaggttctgctatgccagaaccagagagcttgagagcatttgattccgatggagatggaagatactcattcctggagctaagggtagctttaggtatctagcttcatcaggcatattttagaaatggactgcctaatatctatttacctaacaacaaaacaacccttacttacccatcagtcctctagtcctccaaactactgtagcagatactttgccaccttttaacttgtttgaagaagctatataaaagttatttttttaaagaagaagaccattttacttatgatgttcagaaatctatgatttcctacaaccagtaagatcttacattttaaaattgccagaaaaaaaattaaagccctctttttttctctttcctttttttgaggggaggagaccttatcttttaaagctgggaaatgtatatagagagagaataagccacttttatatttcacttaaatttgccttaaattagctgcactttatagagactcagaaaatgtcttttctttaaaagataggccttttctgtttgtaaatatttaaatgaaagaaagcattgtgcatattgtgtggaaagtaggaagaatggttttgaacaggatatgaacaaatgacttattaaaaattgctgatctggtgtaggtggcagctgaaactacatccatgtctccataaggtatccctcaaaggcccaggcgctgccagggggtttgtcctggtagctggaggaaccgatttcagggagtagacactggagacaatactgactccaggcatggctcatggaagtaggattctggttctttgttcctattccctcagctaatcccaacctgggaatcagagaagtcttggggatttttctcatttttagtactatttcagggtttatgagcataaaaagttatccattggggagctccattttccctgctgagtgagctagattgccttccccacccacccacttaagtctgtcttaaagccgtagctggctcccaccaccagtaccatctccatttgaatggcagggctaaattcccccagccattatctcacactgaccacccagagctttagaagagagctgtgcttctaattttgacccagaaaaccataccccttgagattttacctagaggctaaccaagagcctaatatgtttctctgggggatgactaaagccaaaaaggctgtgagatgaaacatgtgaaataatattcagtttccttaccattaccagctcagaagtagctagaggctttctacccaaaggatgccaaagtatagcagggcaggcctggagctagggccttcacatggtggtagcaagtttttcaaatctaatacaatcaagtacaatacttcctttaaatgcttctgtggacctggcatgaaagatccctagattgaaaggaataatacctccatgtctcctgtatgttgagtctagaattgctgtgttgttcttagaagcagtctttgggcaacaacttgaaaggggaaaaaaaaactacaaaaacttaactttggtataggccaagtcagggagaaagtagagaaagctgtcatgccacagacttctttagtggagatcatttcctttttaactttgttcaggttgcccttcaccatggatacagtccggtacccttaaacatttaagggctgttttttttttctttacatgatgttcagcttggtattaaccaaacttaaattttttttccagaagtattaaaatttagttaaagcaagatgaagtcttttcccatgaatgtgtccccttatctcattatagcttatgctcagtttcactttcttggaaaggttaaaacaaattagcctggcactttaggtaacttgaaaataactctcacccttctgactgccttccatccactctcaccccacacctttttttaatatatatacacccttacagattttctaacaaccaaataaaattctagcaataaattgaattatactgctatatttgtatatactgtaccataaatagtatgtctgtacctggaaggtatttttttgagaactgatttatatgaaatatacttgagggtaatgtagcttgtcctttttagtttcaaattcttattcataggcagatactttgaagacaccttaactctttgttgtgtgtattttcccttgcatcagataactatacatggagaaatccattttgttttttggtttatcttctgttcttcctaccttgtgcttgtctgactagtatcacccctgagccagtatacagtaccatcctctccccctaccaagtttggcagaggtgtttatactgcattctcagatctatgaatatttttgtcatcctgcctgagaaagtacatcttccaggcaaaagtagggtatcttgaactcctttcttctgagttgagcagactcactggcttaagcatcccataagcctattatttagtgtgaatttgggacttttatttgtatgttgtcttaacttactaagcctgtgacttgtatttagctgtagtcaagcctcaccagccatatctcatctctgagaggaagactggatagtgagtttggttttggttttggttttaaacccttttaccttttcagtctggcagctcctactgctgctttcctaagttactcaaagcactgcttcttggtccttgttttcttttgccttgtactatcttgtataatgtttactaaaagagcctccccataaatcagagaggcaaaaaggtagcatataaaaagaagaaccaaaagaagagaaaacctgacttctagatgactgtggtgtcatctaaaaggcagaggtgcctgaccctcaggaatgtgtatgatgcaacagagctgaagaatgggttcccttcacctactgctggccattgtcccttctgttggagattcctttctttatggttgctgttcataaccccttcaacacccccccttgctggtcctgccggtcacagttgaggattttggctgtgatgggctcatactcataatggcctgttgagttgtttttagtgacaggttttgtttgctgcacacctcattggcttgcttaccaacaccagctagaagtggtccctctttcatatccaaaccagaacacatttgggtattcctgagactttatagagcgtgtattgtttgttatacgaacctaacctaccttgttgttttctcatattaagaaatttaaatctactttgttttagtgaagctattttggtaatgtataagcaattttggttctgtttagggagaattcagggtttccatgacttgatttgagctttgcatatttcaaataagtaacacagccattttaatttagctaaataaaaaaatttcttttttctctcaaaaaaaaaaaaaaaaaaaaaaaaaaaaa

SEQ ID NO: 509 - DNA, 3522 bp, Homo sapiens
  ref <308>: DATABASE ACCESSION NUMBER: NCBI / NM_014390
  ref <309>: DATABASE ENTRY DATE: 2011-12-17
  ref <313>: RELEVANT RESIDUES IN SEQ ID NO: (1)..(3522)
acgcttgcgcggcgagtagaacgtgtggcggcggcggagatcgcgtctctttcgctccgtgtcccgctgctgctcctgtgagcgcccggcgagtccgtcccgtccaccgtccgcagctggtagccagcctgcccctcgcctcgactccctttcaccaacaccgacacccacattgacacctccagtccggccagccgctccactcgttgcctttgcatctccacacatggcgtcctccgcgcagagcggcggctcctccgggggacccgcggtccccaccgtgcagcggggcatcatcaagatggtcctctcagggtgcgccatcattgtccgaggtcagcctcgtggtgggcctcctcctgagcggcagatcaacctcagcaacattcgtgctggaaatcttgctcgccgggcagccgccacacaacctgatgcaaaggatacccctgatgagccctgggcatttccagctcgagagttccttcgaaagaagctgattgggaaggaagtctgtttcacgatagaaaacaagactccccaggggcgagagtatggcatgatctaccttggaaaagataccaatggggaaaacattgcagaatcactggttgcagagggcttagccacccggagagaaggcatgagagctaataatcctgagcagaaccggctttcagaatgtgaagaacaagcaaaggcagccaagaaagggatgtggagtgaggggaacggttcacatactatccgggatctcaagtataccattgaaaacccaaggcactttgtggactcacaccaccagaagcctgttaatgctatcatcgagcatgtgcgggacggcagtgtggtcagggccctgctcctcccagattactacctggttacagtcatgctgtcaggcatcaagtgcccaacttttcgacgggaagcagatggcagtgaaactccagagccttttgctgcagaagccaaatttttcactgagtcgcgactgcttcagagagatgttcagatcattctggagagctgccacaaccagaacattctgggtaccatccttcatccaaatggcaacatcacagagctcctcctgaaggaaggtttcgcacgctgtgtggactggtcgattgcagtttacacccggggcgcagaaaagctgagggcggcagagaggtttgccaaagagcgcaggctgagaatatggagagactatgtggctcccacagctaatttggaccaaaaggacaagcagtttgttgccaaggtgatgcaggttctgaatgctgatgccattgttgtgaagctgaactcaggcgattacaagacgattcacctgtccagcatccgaccaccgaggctggagggggagaacacccaggataagaacaagaaactgcgtcccctgtatgacattccttacatgtttgaggcccgggaatttcttcgaaaaaagcttattgggaagaaggtcaatgtgacggtggactacattagaccagccagcccagccacagagacagtgcctgccttttcagagcgtacctgtgccactgtcaccattggaggaataaacattgctgaggctcttgtcagcaaaggtctagccacagtgatcagataccggcaggatgatgaccagagatcatcacactacgatgaactgcttgctgcagaggccagagctattaagaatggcaaaggattgcatagcaagaaggaagtgcctatccaccgtgttgcagatatatctggggatacccaaaaagcaaagcagttcctgccttttcttcagcgggcaggtcgttctgaagctgtggtggaatacgtcttcagtggttctcgtctcaaactctatttgccaaaggaaacttgccttatcaccttcttgcttgcaggcattgaatgccccagaggagcccgaaacctcccaggcttggtgcaggaaggagagcccttcagcgaggaagctacacttttcaccaaggaactggtgctgcagcgagaggtggaggtggaggtggagagcatggacaaggccggcaactttatcggctggctgcacatcgacggtgccaacctgtccgtcctgctggtggagcacgcgctctccaaggtccacttcaccgccgaacgcagctcctactacaagtccctgctgtctgccgaggaggccgcaaagcagaagaaagagaaggtctgggcccactatgaggagcagcccgtggaggaggtgatgccagtgctggaggagaaggagcgatctgctagctacaagcccgtgtttgtgactgagatcactgatgacctgcacttctacgtgcaggatgtggagaccggcacccagttggagaagctgatggagaacatgcgcaatgacattgccagtcacccccctgtagagggctcctatgccccccgcaggggagagttctgcattgccaaatttgtagatggagaatggtaccgtgcccgagtagagaaagtcgagtctcctgccaaaatacatgtcttctacattgactacggcaacagagaggtcctgccatccacccgcctgggtaccctatcacctgccttcagcactcgggtgctgccagctcaagccacggagtatgccttcgccttcatccaggtgccccaagatgatgatgcccgcacggacgccgtggacagcgtagttcgggatatccagaacactcagtgcctgctcaacgtggaacacctgagtgccggctgcccccatgtcaccctgcagtttgcagattccaagggcgatgtggggctgggcttggtgaaggaagggctggtcatggtggaggtgcgcaaggagaaacagttccagaaagtgatcacagaatacctgaatgcccaagagtcagccaagagcgccaggctgaacctgtggcgctatggagactttcgagctgatgatgcagacgaatttggctacagccgctaaggaggggatcgggtttggcccccagccccgctcacgccagtccctcttcctctgccgggagggtgttttcaactccaaaccccagagaggggttgtagattgggtccagctttgcttcagtgtgtggaaatgtctcgtggggtggcatcggggctgcggggtggggaccccaaggctttctggggcagacccttgtcctctgggatgatgggcactgctatccacagtctctgccagttggttttatttggaggtttgtgggctttttttaaaaaaaaaaagtcctcaaatcaggaagaaacatcaaagactatgtcctagtggagggagtaatcctaacacccaggctggccgccagctggcacctgcctctatcccagactgccctcgtcccagctctctgtccaactgttgattatgtgatttttctgatacgtccattctcaaatgccagtgtgttcacatcttcgctctggccagcccattctgtatttaaagcttttgaggcccaataaaatagtacgtgctgtctgcagcccttattgatcaaaaaaaaaaaaaaa

SEQ ID NO: 510 - DNA, 868 bp, Homo sapiens
  ref <308>: DATABASE ACCESSION NUMBER: NCBI / NM_014623
  ref <309>: DATABASE ENTRY DATE: 2011-12-18
  ref <313>: RELEVANT RESIDUES IN SEQ ID NO: (1)..(868)
accggcgccgggattcggatgggggcgggtgggggacgctgcagctggggccatttgaggggagcccatggggcctgaaaggcatctgtcaggcgcccctgcccggatggcaacagtagttctaggaggagacaccatgggccctgagcgtatcttccccaatcagactgaggaactgggacatcagggcccttcagaaggcactggggattggagcagtgaggagcctgaggaagagcaggaggaaacggggtcgggcccagctggctactcctaccagcccctgaaccaagatcctgaacaagaggaggtggaactggcaccagtgggggatggagatgtagttgctgacatccaggatcgaatccaggccctggggcttcatttgccagacccaccattagagagtgaagatgaagatgaggagggagctacagcgttgaacaaccacagctctattcccatggacccagaacatgtagagctggtgaaaaggacaatggctggagtaagcctgcctgcgccaggggttcctgcctgggctcgggagatatcggatgcccagtgggaagatgtggtacagaaagccctccaagcccggcaggcatcccctgcctggaagtgaccacagtgagagctgccttatattcctacattccaggccagaaccagcacaggactgaacacatccctggttgtaatgtccatttccatcttccccgtctccctttccacatcaaggcacatcagacttctcagagacccactttattcagttctgtacatatggggacatcggtccaagcccaacccaccttagcatgtatcactctgtggagaataaagcaccctatgtacacagccaaaa

SEQ ID NO: 511 - DNA, 926 bp, Homo sapiens
  ref <308>: DATABASE ACCESSION NUMBER: NCBI / NM_014453
  ref <309>: DATABASE ENTRY DATE: 2011-11-12
  ref <313>: RELEVANT RESIDUES IN SEQ ID NO: (1)..(926)
acgtcacgtcgtttaatccggaaacggcggcggcggcgacaggaccgaggggccttagttggtgggcaagtcggggatcccagaaagagaagcgtgacccggaagcggaaacgggtgtccgtcccagctccggcctgccagtgagcttctaccatcatggacctattgttcgggcgccggaagacgccagaggagctactgcggcagaaccagagggccctgaaccgtgccatgcgggagctggaccgcgagcgacagaaactagagacccaggagaagaaaatcattgcagacattaagaagatggccaagcaaggccagatggatgctgttcgcatcatggcaaaagacttggtgcgcacccggcgctatgtgcgcaagtttgtattgatgcgggccaacatccaggctgtgtccctcaagatccagacactcaagtccaacaactcgatggcacaagccatgaagggtgtcaccaaggccatgggcaccatgaacagacagctgaagttgccccagatccagaagatcatgatggagtttgagcggcaggcagagatcatggatatgaaggaggagatgatgaatgatgccattgatgatgccatgggtgatgaggaagatgaagaggagagtgatgctgtggtgtcccaggttctggatgagctgggacttagcctaacagatgagctgtcgaacctcccctcaactgggggctcgcttagtgtggctgctggtgggaaaaaagcagaggccgcagcctcagccctagctgatgctgatgcagacctggaggaacggcttaagaacctgcggagggactgagtgcccctgccactccgagataaccagtggatgcccaggatcttttaccacaacccctctgtaataaaagagatttgacactaaaaaaaaaaaaaaaaaaa

SEQ ID NO: 512 - DNA, 3032 bp, Homo sapiens
  ref <308>: DATABASE ACCESSION NUMBER: NCBI / NM_012127
  ref <309>: DATABASE ENTRY DATE: 2011-12-17
  ref <313>: RELEVANT RESIDUES IN SEQ ID NO: (1)..(3032)
aacacgattcctctggccaggccaaggggagggcgacactgacaggcgccccccacccaggggccgtggcgaagcaaggggccggctgctcagaaaaggataagaagtggtttctcctcccctcttcccttcctcatcctgcagcccgcgcctcccccctcgccgcgctgcgcacggatggcggcgggagccgcagagccaccatgttcagccagcagcagcagcagcagctccagcaacagcagcagcagctccagcagttacagcagcagcagctccagcagcagcaattgcagcagcagcagttactgcagctccagcagctgctccagcagtccccaccacaggccccgttgcccatggctgtcagccgggggctccccccgcagcagccacagcagccgcttctgaatctccagggcaccaactcagcctccctcctcaacggctccatgctgcagagagctttgcttttacagcagttgcaaggactggaccagtttgcaatgccaccagccacgtatgacactgccggtctcaccatgcccacagcaacactgggtaacctccgaggctatggcatggcatccccaggcctcgcagcccccagcctcacacccccacaactggccactccaaatttgcaacagttctttccccaggccactcgccagtccttgctgggacctcctcctgttggggtccccatgaacccttcccagttcaacctttcaggacggaacccccagaaacaggcccggacctcctcctctaccacccccaatcgaaaggattcttcttctcagacaatgcctgtggaagacaagtcagaccccccagaggggtctgaggaagccgcagagccccggatggacacaccagaagaccaagatttaccgccctgcccagaggacatcgccaaggaaaaacgcactccagcacctgagcctgagccttgtgaggcgtccgagctgccagcaaagagattgaggagctcagaagagcccacagagaaggaacctccagggcagttacaggtgaaggcccagccgcaggcccggatgacagtaccgaaacagacacagacaccagacctgctgcctgaggccctggaagcccaagtgctgccacgattccagccacgggtcctgcaggtccaggcccaggtgcagtcacagactcagccgcggataccatccacagacacccaggtgcagccaaagctgcagaagcaggcgcaaacacagacctctccagagcacttagtgctgcaacagaagcaggtgcagccacagctgcagcaggaggcagagccacagaagcaggtgcagccacaggtacagccacaggcacattcacagggcccaaggcaggtgcagctgcagcaggaggcagagccgctgaagcaggtgcagccacaggtgcagccccaggcacattcacagcccccaaggcaggtgcagctgcagctgcagaagcaggtccagacacagacatatccacaggtccacacacaggcacagccaagcgtccagccacaggagcatcctccagcgcaggtgtcagtacagccaccagagcagacccatgagcagcctcacacccagccgcaggtgtcgttgctggctccagagcaaacaccagttgtggttcatgtctgcgggctggagatgccacctgatgcagtagaagctggtggaggcatggaaaagaccttgccagagcctgtgggcacccaagtcagcatggaagagattcagaatgagtcggcctgtggcctagatgtgggagaatgtgaaaacagagcgagagagatgccaggggtatggggcgccgggggctccctgaaggtcaccattctgcagagcagtgacagccgggcctttagcactgtacccctgacacctgtcccccgccccagtgactccgtctcctccacccctgcggctaccagcactccctctaagcaggccctccagttcttctgctacatctgcaaggccagctgctccagccagcaggagttccaggaccacatgtcggagcctcagcaccagcagcggctaggggagatccagcacatgagccaagcctgcctcctgtccctgctgcccgtgccccgggacgtcctggagacagaggatgaggagcctccaccaaggcgctggtgcaacacctgccagctctactacatgggggacctgatccaacaccgcaggacacaggaccacaagattgccaaacaatccttgcgacccttctgcaccgtttgcaaccgctacttcaaaacccctcgcaagtttgtggagcacgtgaagtcccaggggcataaggacaaagccaaggagctgaagtcgcttgagaaagaaattgctggccaagatgaggaccacttcattacagtggacgctgtgggttgcttcgagggtgatgaagaagaggaagaggatgatgaggatgaagaagagatcgaggttgaggaggaactctgcaagcaggtgaggtccagagatatatccagagaggagtggaagggctcggagacctacagccccaatactgcatatggtgtggacttcctggtgcccgtgatgggctatatctgccgcatctgccacaagttctatcacagcaactcaggggcacagctctcccactgcaagtccctgggccactttgagaacctgcagaaatacaaggcggccaagaaccccagccccaccacccgacctgtgagccgccggtgcgcaatcaacgcccggaacgctttgacagccctgttcacctccagcggccgcccaccctcccagcccaacacccaggacaaaacacccagcaaggtgacggctcgaccctcccagcccccactacctcggcgctcaacccgcctcaaaacctgatagagggacctccctgtccctggcctgcctgggtccagatctgctaatgctttttaggagtctgcctggaaactttgacatggttcatgtttttactcaaaatccaataaaacaaggtagtttggctgtgca

SEQ ID NO: 513 - DNA, 3286 bp, Homo sapiens
  ref <308>: DATABASE ACCESSION NUMBER: NCBI / NM_012099
  ref <309>: DATABASE ENTRY DATE: 2011-08-14
  ref <313>: RELEVANT RESIDUES IN SEQ ID NO: (1)..(3286)
aagttctgaacttgtgaggcatctgggcctccccagaagacatttaacacagaaagcacagccctactaactagtattcttacctgtctcttcaagaatttcagaccaatcgaccgtcctgtctctttaaggcttaggaagagcagtgtggctgcccctttaaggaggcgttgcaacaaaccatattggacagacgatgggggcgacccatcgggacccgacgggcctctgactccagcaatacagcgaatcagcggctttcgggaatacatttttcggaaaaagacttcttcctcggttttctgctctgcacacgttgaaattttccccagtttttcctgcagatcgggagtcgagcaatgcctacccccgcgctcccgcaccagttgggcgctcccggatgatgccctacccctttggatccacgtggtctgcaacctggtgcgagcagcccgggctacagggttgcctgaggtgtgggtcccaggatggaggagccccaggccggcgatgctgctcggttctcttgtccccccaactttaccgcgaagcccccagcctcagagtcccctcgtttctccttggaggcgctgacgggtccagatacggagctgtggcttattcaggcccctgcagactttgccccagaatgcttcaatgggcggcatgtgcctctctctggctcccagatcgtcaagggcaaattggcaggcaagcggcaccgctatcgagtcctcagcagctgtccccaagctggagaagcgaccctgctggccccctcaacggaggcaggaggtggactcacctgtgcctcagccccccagggcaccctaaggatccttgagggtccccagcaatccctgtcagggagccctctgcagcccatcccagcaagtcccccaccacagatccctcctggcctgaggcctcggttctgtgcctttgggggcaacccaccagtcacagggcctaggtcagccttggcccccaacctgctcacctcagggaagaagaaaaaggagatgcaggtgacagaggccccagtcactcaggaggcagtgaatgggcacggggccctggaggtggacatggctttggggtcgccagaaatggatgtgcggaagaagaagaagaaaaaaaatcagcagctgaaagaaccagaggcagcagggcctgtggggacagagcccacagtggagacactggagcctctgggagtgctgttcccgtccaccaccaagaagaggaagaagcccaaagggaaagaaaccttcgagccagaagacaagacagtgaagcaggaacagattaacactgagcctctagaagacacagtcctgtccccgaccaaaaagagaaagaggcaaaaggggacggaagggatggagccagaggagggggtgacagttgagtctcagccacaggtgaaggtggagccactggaggaagccatccctctgccccctacgaagaagaggaaaaaagaaaagggacagatggcaatgatggagccagggacggaggcgatggagccagtggagccggagatgaagcctctggagtccccaggggggaccatggcgcctcaacagccagaaggagcgaagcctcaggcccaggcagctctggcagctcccaaaaagaagacgaagaaagaaaaacagcaagatgccacagtggagccagagacagaggtggtggggcctgagctgccggatgaccttgagcctcaggcagctcccacatccaccaagaagaagaagaagaagaaagagagaggtcacacagtgactgagccaattcagccactagagcctgaactgccaggggagggacagcctgaagccagggcaactccgggatccaccaagaagaggaagaagcagagtcaggaaagccggatgccagagacagtgccccaagaggagatgccagggccgccactgaattcagagtctggggaggaggctcccacaggccgggacaagaagcggaagcagcagcagcagcagcctgtgtagtctgcccccgggaaactgaggaactaaagaaagctgaaggtgcccacctgggccaccagaaggtgacacccccagaatccctccccagagactgcaccagcgcagccagcaggagcctggcctgggaggacgatttattattacactgggggtttccttggcagctggggtcatcagggtactttcaagaagggctcgtgcaggacatcaaacagcctccgggcctggatgggagggagaaaaaaatgaggaaccagtcattaaaggagctgtttcctgggtaaatctagagtggggttttggttctttattttcccctataccctcaagcatttatccattgagttacaaacaatccagttacaatctttttaagttattattattattattattttttttttttttgagatggagtctcgctctgtcgcccaggttggagtgcagtggcgcaatctcggctcactgcaagctccgcctcccgggttcacgccattctcctgcctcagcctcctgagtagctgggactacaggcccctgcccagctaattttttgtatttttttttagtagagatggggtttcaccacgttagccaggatggtctcgatctcctgacctcctgatgcgcctgcctcagcctcccagtgctgggattataggtgtgagccactgcgcctggctaagttattattatttttttgagacagtctcctggtgtcacccaggctggagtgcagtggtgtgatcttggctcactgcaacctccgcctcctgggttccaacgattctcctgcctcagcctcccgagtagctgggcctaaaggtgcccaccactatacccggctaatttttgtatttttagtagagacaggggtttcaccatattggccaggctggtctcgaactcctgacctcgtgatccacctgccttgacctcccaaagtgctaggataacaggtgtgagccaccgcaccctgccaagttattttaaaatgtaccattattattgactatagtcacctggttgtgttatcaaatagtatgtcttattcattctttctttgtgtgtgtgtgtgtgtgtgtgtgtgtgtgtggtacccattaaccttccccatctccctgccagcccctaactaccctccccagcctccaggaactatccatccactcttatctccatgagttcaattgttttgatttttagatacacaaataaataagaacatgcaatgtttgtctttctgtgcctggcttatttcactt

SEQ ID NO: 514 - DNA, 4268 bp, Homo sapiens
  ref <308>: DATABASE ACCESSION NUMBER: NCBI / NM_006888
  ref <309>: DATABASE ENTRY DATE: 2011-12-24
  ref <313>: RELEVANT RESIDUES IN SEQ ID NO: (1)..(4268)
gatacggcgcaccatatatatatcgcggggcgcagactcgcgctccggcagtggtgctgggagtgtcgtggacgccgtgccgttactcgtagtcaggcggcggcgcaggcggcggcggcggcatagcgcacagcgcgccttagcagcagcagcagcagcagcggcatcggaggtacccccgccgtcgcagcccccgcgctggtgcagccaccctcgctccctctgctcttcctcccttcgctcgcaccatggctgatcagctgaccgaagaacagattgctgaattcaaggaagccttctccctatttgataaagatggcgatggcaccatcacaacaaaggaacttggaactgtcatgaggtcactgggtcagaacccaacagaagctgaattgcaggatatgatcaatgaagtggatgctgatggtaatggcaccattgacttccccgaatttttgactatgatggctagaaaaatgaaagatacagatagtgaagaagaaatccgtgaggcattccgagtctttgacaaggatggcaatggttatatcagtgcagcagaactacgtcacgtcatgacaaacttaggagaaaaactaacagatgaagaagtagatgaaatgatcagagaagcagatattgatggagacggacaagtcaactatgaagaattcgtacagatgatgactgcaaaatgaagacctactttcaactcctttttcccccctctagaagaatcaaattgaatcttttacttacctcttgcaaaaaaaagaaaaaagaaaaaagttcatttattcattctgtttctatatagcaaaactgaatgtcaaaagtaccttctgtccacacacacaaaatctgcatgtattggttggtggtcctgtcccctaaagatcaagctacacatcagttttacaatataaatacttgtactaccttaatgataaggactccttaaagttccatttgctaatgattaatacactgtttgggctggccagtttttcatgcatgcagcttgacgattgagcacagtcaggcctttgtattaaaaatgaaaaatgaaaaaacaaattcaaaacctattcaaatgggttctagttcaatttgtttagtataaattgtcatagctggtttactgaaaacaaacacatttaaaattggtttacctcaggatgacgtgcagaaaaatgggtgaaggataaaccgttgagacgtggccccactggtaggatggtcctcttgtacttcgtgtgctccgacccatggtgacgatgacacaccctggtggcatgcccgtgtatgttggtttagcgttgtctgcattgttctagagtgaaacaggtgtcaggctgtcactgttcacacaaatttttaataagaaacatttaccaagggagcatctttggactctctgtttttaaaaccttctgaaccatgacttggagccggcagagtaggctgtggctgtggacttcagcacaaccatcaacattgctgttcaaagaaattacagtttacgtccattccaagttgtaaatgctagtctttttttttttttttccaataaaaagaccattaacttaaagtggtgttaaatgctttgtaaagctgagatctaaatggggacaaggcaggtggaggggaggccagtgtacatgtaaatgcccacagcccagcattgggtttccctcccaaggccccagcaccaacctctgagcccaagaccttgcctgaaaacaagcagataccgattgcttcatcctatttatggacatgtaggtctagttgcattttcactggggggaggggggaaggtgaattatggtaacttttaatgatctattcaggcagtagagctcttaaggaaaaaaaaaaacccactttctctcaagcatgtatttaggggttgttctcaattgtgctgctgattacctgtcttatgtaactacttgagaccatctgcaagagacatgatttagtgtgtctgtaattcaatcttcgctgtgtgtggtagaagcagtagtcacttttgtaagccagtctcttcatgcctaaaagacactaccagtcacctttgattcgcgacttttaatttatgattatacttagcctcctcctcctttttttttttttcccaagttgacttgactttgcttttttccccccaagtagaactaatgctagcttccagcttgaaagtaaaactccagtgtggagtgaattttgtgtctaattataaacctgtaaccaaaactcagacatctggtactggtctttgcattgagattggtccctgtaaaaccccctttaaaagcatattgcatttagtacagagctcttttttgaaatgaaggctggagatgtgcatttttcacggtgttaactggttgtatcttattagcaaggagattggggttttgagtgtttgcgtgggtggtttcaatttgccagggaacagtggcaggctgctagcaaggcagtgagaagctcttggcagccaaatgggtgcattcagggctgatttatagagacccttggcttctccttctcctactccctgtctttctggcattttgtagcttgttagattttctgccagaggggtgggtcagagcagtggaggggagacatcgcccatgtgcttctgctactggtccttgggctgggtggttggtagaggagatgttgacactatgagctaagggttggcttttgtaattacctgaatctgaaaggaatgcctaaggttaccttggggtttctcttctggtgagatagggttcctggtttgagtaagttaatgtcctggatatttcttgtggcagggggtggtcaaagagcctgattgctgacccagtctcaggcctgtggtcgatgacctctcggtagtttcaaagggggctggagggggatatttgacttgttttttcgaaatgtagccttctaaccctcaagtctttagaagctgggtggactcttagtggtcctgcagcgtatcctaaaagactacctttgaaacaggattcttgtatggccaggatcctgtctgggaaccagaaaccctacaccctccccctccagggaatgctgagttccagttttgagcagaggtgaggcagaatccactgtagccttccgccctggtatttggggggatgaccagcccaggcgttgggtgttagtctgcatgagtttgtgagaggaaatagctgggtgtcctggcagtgcccttgaagttggttaggaccttcctgtaaactcttgcccctacttctaactactctataaatatatacatatatttatatataaagtgattagttgaactggcatcctgctttagcctgagacttgccataagaaactgctgagtacttggcaaaccctttcatagttttgttctccatctgtttggggtaggtgttgagcgaggcaaatggatctcgatatttcagatgggcttttgatgcactgttgccaaggaaggctttttctgattttttgacaaatgaatttttgcacactttcattggtgtctttcggcaacttacacacattgaaaatgagctattgtacatatttttatattctctttataaatgcatgtctgattgtacttgtaacaatattgtaatgaacggctgtgcagtaggcccagcgctgctgtgtctcgtcagaggaatagcttaccacgaacccctcagcatactgggaatctcttcctgaacaacgaatgtaaatttggtcaagtctactcttccgttcattcaattattttaagcatttgaattatttattgtatatcctaaatatatttctcctttggcagtgactagatttccactaatgtgtcttaatctatccctccagctggcagttactgtttttttaatcccctgaagttgtcctgtaggagacagaaattctttgctgtctgtatcccttggagtaagaaggtagtggcatgggtggagtgtgtgttctttctccaaatctattatgatgtttattaaacacttctgtagcaaagatggtggtagttcttttgttactgaagttgcccttcaccatggctatttgaaaaggagatgtacttggacgtttctgtaaatcttgagataaactgtttggagatttaaccacctctctgatgggggaccaactctatggaaattgtaaatacgttttatttataaacctggcactgtattcaataaacatttctgcagcctttcatctctaactgcgaaaaaaaaaaaaaa

SEQ ID NO: 515 - DNA, 3154 bp, Homo sapiens
  ref <308>: DATABASE ACCESSION NUMBER: NCBI / NM_006867
  ref <309>: DATABASE ENTRY DATE: 2011-12-25
  ref <313>: RELEVANT RESIDUES IN SEQ ID NO: (1)..(3154)
ggcagcccacgtccagggagggcggagggaggaggagaggcgcggagaggagggaggggagaggggagggaggaaggcgagagaaagggagctgcttccatcccggacttcccagagcctgcctggagcgcgtactcagcggctctcgggtcccagcgtcccagccgcggcccgcgctcctccgccccgctcctcctcctcctcttcctcctcctcctcctctctaggcacccccgtcccctccttccagcggctgcagcccccagccccaactctccgcgcttactcctgggacgcgcgtcctcgccccatcctttgcttccttccttccttccttcttccttcctcccctggctcccgccctccctctccaggtcgccctcccggggcccgattgtctcggtgccccgctcccggcccgcgccctgccccgtctctcccttgcacttcctgagtcgcccgccgccgccgtcgcagactcgccgcgggagccccagcccaacccgagcccgacagccactgccccggctccagctccagccccacagcccgcggcgcccgcccgagggagccccggcgcccggggaaggctccagtgggctagcgcgccctcgcccagccccgcgccccagccctgcccggcccggcgaggaaggaccgggaagatgaacaacggcggcaaagccgagaaggagaacaccccgagcgaggccaaccttcaggaggaggaggtccggaccctatttgtcagtggccttcctctggatatcaaacctcgggagctctatctgcttttcagaccatttaagggctatgagggttctcttataaagctcacatctaaacagcctgtaggttttgtcagttttgacagtcgctcagaagcagaggctgcaaagaatgctttgaatggcatccgcttcgatcctgaaattccgcaaacactacgactagagtttgctaaggcaaacacgaagatggccaagaacaaactcgtagggactccaaaccccagtactcctctgcccaacactgtacctcagttcattgccagagagccatatgagctcacagtgcctgcactttaccccagtagccctgaagtgtgggccccgtaccctctgtacccagcggagttagcgcctgctctacctcctcctgctttcacctatcccgcttcactgcatgcccagatgcgctggctccctccctccgaggctacttctcagggctggaagtcccgtcagttctgctgaatactatacccttcagcaatggctactagaaggacgaacaattgccctcctttggaagtacggctaatagaagccctagatccgaataagatccgaataagaatatgtaatggaccaggcgcagtgcctcacgcctgtcatcccagcactttgggaggctgaggcaggcggatcacttgatgccagaagtttgagaccagcccagccaacatggtcccaggtgtgtgatggcggctgcaatctgtcttgtgggtattaatgcaatcttcagtggtggctactgttctctagctgttctacaaaactggagcatgctggcttgaaaaacccttgcccagttttgatcccttcaagactttgtcacagcctctatcacacatctgtttttctcgaagaaaaaaatataattaataaaaatgttttactcttttacactgtataattgtaagaaatagcgtattatttgtgaatgcatggtctgaaatttctgtacagtttggagatattttcaaacgaaacgtaagagaagtcaacaataaaaccaagaaaagtgagtatttttataccaaacattttaagtatgctgggatggacgatcttacactggtttggatcacagtttttgttcttgacttttgaatgcttgtaattaaaaatatctatttttttcctctgaagtaagttgcatgtttgaggcatgtttccaaatattatcaaaatatcctgaattgtattgtgaatatatagaaatctgtgcctggccggagtccagggtaaattagtagcatggtgttagatgttagaaacagaactgttatttgcagtgttaggtctaggatcccagttctagtaggacagccctgcaagacaatcaaccagaagcctccaggagcttctacctatggcttattcacaactgggcaagaaaacatcattggtaagaactgctgagtgtgcccttagaaagccctagtagctccagctgtgactatatcaactgtgtgccaagtgtgactttgtacagttttatgtttccactctcctgtatgtgtagccactcgatgcctaacctaccttccacaagccagccccgcatccctgctcccgcagtgtaagtgcagagcctgcctcactggtaagggaaaaccttggcttgggaggccagccctggcccttgaaggggttggctgtgcccagcccacctggctgcagtgggcagctcatgtctgtatctccaaagtgatgtttgtttgcaaaacaccggctgaactgagctggtgttgccaactcttggcagcactgggccaaaccgaccacataccatgagctcccaaatggcgtgtgctcactgtgagacgtcctgccacaccccacaggagacggaggcagtgggcatttggaaccaattctattcagacttcgtcaaagccaaagtcagtctggtgttgtcagttgacacatctccagagttcatgacagctcaacctctccccttgtacagaagccatttttgtaaaaccacactgacctaaattcagctgccaaacacagtctttcctattgatccgctcggcttatgttgaaaatttcaatgtcatgattacctggttggtttgggtttttgttttgttattttccattagaaatataaagatgtcaagaagcttttaaaggtcaacacaaaaaaccaaggccaggagtgaggggctctttcttaccgtaaataaggggaaaaggcagttagctcaaggacttgtgacggatccactttggtgttcaaggacctgcttatgccctcagtgccaatcggctcttggtgagatgactgtactcctaaggaaaatagccacttctgcagtctattatgcttttataactgtttaaaggtacttttctat

SEQ ID NO: 516 - DNA, 4432 bp, Homo sapiens
  ref <308>: DATABASE ACCESSION NUMBER: NCBI / NM_006743
  ref <309>: DATABASE ENTRY DATE: 2011-10-22
  ref <313>: RELEVANT RESIDUES IN SEQ ID NO: (1)..(4432)
gaacactgctcccttcgctttgctgtcccttcctctccccaccactccgctcctgctggcctcagccaatcagcacgcacgccgggacgcgcaaggggaacgttccgggacgttctcgctacgtactctttatcaatcgtcttccggcgcagccccgtccctgttttttgtgctcctccgagctcgctgttcgtccgggttttttacgttttaatttccaggacttgaactgccatgtcctctgaagaaggaaagctcttcgtgggagggctcaactttaacaccgacgagcaggcactggaagaccacttcagcagtttcggacctatctctgaggtggtcgttgtcaaggaccgggagactcagcggtccaggggttttggtttcatcaccttcaccaacccagagcatgcttcagttgccatgagagccatgaacggagagtctctggatggtcgtcagatccgtgtggatcatgcaggcaagtctgctcggggaaccagaggaggtggctttggggcccatgggcgtggtcgcagctactctagaggtggtggggaccagggctatgggagtggcaggtattatgacagtcgacctggagggtatggatatggatatggacgttccagagactataatggcagaaaccagggtggttatgaccgctactcaggaggaaattacagagacaattatgacaactgaaatgagacatgcacataatatagatacacaaggaataatttctgatccaggatcgtccttccaaatggctgtatttataaaggtttttggagctgcaccgaagcatcttattttatagtatatcaaccttttgtttttaaattgacctgccaaggtagctgaagaccttttagacagttccatctttttttttaaattttttctgcctatttaaagacaaattatgggacgtttgtagaacctgagtatttttctttttaccagttttttagtttgagctcttaggtttattggagctagcaataattggttctggcaagtttggccagactgacttcaaaaaattaatgtgtatccagggacattttaaaaacctgtacacagtgtttattgtggttaggaagcaatttcccaatgtacctataagaaatgtgcatcaagccagcctgaccaacatggtgaaaccccatctgtactaaacataaaaaaattagcctggcatggtggtgtacgcctgtaatcccagtgacttgggaggctgaggcaggagaatcgcttgaacccgggaggcggaggttgcagtgagctaagatcgcgccactgtactccagcctgggcaacagcgagactccatctcaaaaaaaaaggaaatgtgtatcaagaacatgattatccagcggtattttctaattcagatcatcaaactgattatatagaagagttggctttaaaatgtttgcaaatgtctttttttttttaatactggaagaaaaaatattctgttgtgtctcatacagtgcttaggatgtctttcacagagcttattaaaaagatgaaacctgagaacaaactgctttattcttactcagcccattttgcaaattaaaagtgggggcagaggtgggcggatcacctgaggtcaggagttcgagaccagcctggccaacagggcaaaaccccatctctactaaaaatacaaaagttagcggggcgtggtggcgggtgcatgtaatcccagctactcgggaggctgaggcaggagaattgcttgaacccaggaggcggaagttgcagtgagctgagattgtgccactgcactccagcctaggtgacagcaagactctgtctcaaaaaaaaaaaaatggcacatcaacgagagggaggcttggagaatatttggttggtgggtgggcagggactgccagagggttaggtgtacattgaggcctgaggcctgctggaattgggtttccttaactggtctcttatcttagtcccattgttctgagaacataagcacctaatctcatggcgtgagctaatccctatcataaatagtggtaccagttcattccttcccctgaaatgatgggggttgggcagagatgcactgaactcatctttgtgtatgagggccatgagagaggcctggtttgaaaacaatgctaagagctcagattccaggatttatgtaggggctcttctacttcccaggtatttgacctcaggtgagtcatttaatttcagccttatgccattttacattttctgtggagggttaggttaattggcatataaagccactgagaagagttggcaaagctctcagtcacggggatttgatcttttttggtgtgtgtgtgtcttgggtggtaaagtggtaattttgtaattctagctggtcttagttcctcagttctgctccctttagtcatggttctttctagtggctgtattgaggccccatgggtgttatccctccattggttctagtttggaacagaaaaatctgttgtattcatggctttcacctggctaatactgagctaagttaccaccaggttgcaaactccaggacattattgtcctgagctgcctattcccttgctggtgcgttgtggaaccctgtattattagttccagtcctggaggcctgcctcctgagtttcccagctagttgggacaggccccaatatcccttcttcctgtaacccaaacagtcatgaatttgctttggcaggtggatggagacttgggaacttccacctcacccactaagccaggcccaggctatggggcattgtggctaaccccaccaggtggatacttggtctgaggacgcatcttattctgggcctttagggagctaaggcagtgagaattggcaggaggactgctgtgaatgccttgtaggtcgggggattggagggggtcctctgctccctgtctctcaggatggcaatgtacctctcacccccagtgtcagctgaggtaggatccataatcagtaatattcctgcaacaaaatgttcctaagtggaatcaatgaagaccaaaatttatttgtataacaactctaaacctgctctgctctgctgtgtttacaatgtgctttgtgatcatccagcccagggagtcccagtctctggctgtctatctgctctaaggaagagagcccacagttctctatagtgccatagtctgtgatgaataaagttccagatttgaggtcaacccccgaccacccttaaagtgcttgttggtctcctactttggtttgtcttcagcatccaactgatgcacatttgtcaagaacccactgaggctagaaaccccccaaacactcaaggtaccttgagaacatgtatcccaagacctgcaaagaccaaacacatggcctgtaactacttttcactttcaagccctggaacttgtctgtaccaaaaatctttctgaaccattcaccaaatctcttgtcaagggccagaataaattaagagattggcttttggttttcaattaggctttcaagtcctaagcccaacccctcctatcccacctaggcagaaatcacttcagatccttgcttcctagtttaatttcttctctgcctcagttataacatccataaaatggaaataataatacccacctcacacaggggttaggagtgtttttttgttggtttttttccagacagggtctcactctgtctcccaggctggagtgcagtggcacaatctcggctcactgtaccctccgcctcccaggttcaagcagttctcatgcctcagcctcccaagtagctgggattacaggtgcctgccaccacgcccggctaatttttgtattaatagagacagggtttcaccgtgttgggcaggctggtcctgaactcctgacctcaagtgatccacccgcctcggcctcccaaagtgctgggattacaggcgtgagccaccacacctggcctaggagttaagagtattaaatgttaagaacagaccaagtccatcaaacagctccacacccttgttccatgttctggattggggagttgtgggggtggaggtgtagaacttttaaaaagcttcttaaaataagttgctgtgaatacttcaggtatataaaaaaacattggttgacaataagccagtgttctgccattcttacctgcttatcaagacaaaacctgctcaagtccctgcccagctgcattccaagtgttttcaagtttggtggtaagacctgacctgaggcttcttataacctttactcagtgggaatatgcatacagttcactacagaaatatttgtatttacttagaggaagtgccctggatctgggggcgggggggggcggggggaatgggtcttttctaaattgttaaaagcagttcatgccattattcttaataaacatttctaatatgctgtgaaagag

SEQ ID NO: 517 - DNA, 1517 bp, Homo sapiens
  ref <308>: DATABASE ACCESSION NUMBER: NCBI / NM_006688
  ref <309>: DATABASE ENTRY DATE: 2011-12-17
  ref <313>: RELEVANT RESIDUES IN SEQ ID NO: (1)..(1517)
gcgaggcaggagccggcggctgggctccgcagcgcagccagcgcagcgcggcgccccgggcccggccccatgcccgcagccccgccggaccgtccttgagcgcgggcgcctagcccgcgccccctgcccgccggcaccattgccccgacggcgcggccgggcggcccggcgctccccaggctccgcgcgggccgaaagacgctgctagcggccgccgcgggtgtggtgatgctgctggtgctggtggtgctcatccccgtgctggtgagctcgggcggcccggaaggccactatgagatgctgggcacctgccgcatggtgtgcgacccctaccccgcgcggggccccggcgccggcgcgcggaccgacggcggcgacgccctgagcgagcagagcggcgcgcccccgccttccacgctggtgcagggcccccaggggaagccgggccgcaccggcaagcccggccctccggggcctcccggggacccaggtcctcccggccctgtggggccgccgggggagaagggtgagccaggcaagccgggccctccggggctgccgggcgcggggggcagcggcgccatcagcactgccacctacaccacggtgccgcgcgtggccttctacgccggcctcaagaacccccacgagggttacgaggtactcaagtttgacgacgtggtcaccaacctaggcaacaactacgacgcggccagcggcaagtttacgtgcaacattcccggcacctactttttcacctaccatgtcctcatgcgcggcggcgacggcaccagtatgtgggcagacctctgcaagaatggccaggtgcgggccagtgctattgcccaggacgcggaccagaactacgactacgccagcaacagcgtgatcctgcacctggacgccggcgacgaggtcttcatcaagctggatggaggcaaagcacacggcggcaacagcaacaaatacagcacgttctctggcttcatcatctactccgactgagctccccacgtctccctccacccacgtccctcacccgccggggtcccctccgggcggggcagacgatgactcgcccctcgcccacccgctcgctgcccggccctccccggctatgacgcccccggcccgtgctcaacaccgcctgggccacagctaggccctcccaccggctcgctgcagagccgggcccagcgcgccctgtccccgtgccagggaaccggggttgaccgcccccgcccagcccgcgctatatatttgtacaataggactgtttactgcccacctccgcctgccagcccaccccagcctggggagaggtcgcggcggcgggtttgcttcctgcgctctgagatgagctgccctcggctccctccggggtggcgcgcccgggggaggggggagttgggggctggatagcttcccagcaccctcagagcccccgcccggctgtgccccgtctgaccaaagttataataaaaacattttcaccccgcaaaaaaaaaaaaaaaaaa

SEQ ID NO: 518 - DNA, 4308 bp, Homo sapiens
  ref <308>: DATABASE ACCESSION NUMBER: NCBI / NM_006295
  ref <309>: DATABASE ENTRY DATE: 2011-11-12
  ref <313>: RELEVANT RESIDUES IN SEQ ID NO: (1)..(4308)
gcgcctgacgggagcgtcgtgctcaggggtgtcctctcgtcctgcgtccgcgcccagcgccccgcgccccgcgctgttcctcgtgagaccggcgggcggcgagccgcgcggcccccggggcagtgtcggacacggcgggcgcgcactcgcaggcggggcacggccgcccccgccaggacccgcaggcccggaaacgctccctgtcacaaaggggggaacacgtgggcgccggctgccggggcggcgatcttagggaactagggtcacctggagagccgcccaccgtctctgcccgctcgactcctccgcccgggccgctcggccggtccagccgcggccggcgcctggctgtgaggtggattcccggcccagtctgaccatctccctccagtttttccacttcgttcggaccttctcataactatgtccaccctctacgtctcccctcacccagatgccttccccagcctccgagccctcatagccgctcgctatggggaggctggggagggtcccggatggggaggagcccacccccgcatctgtctccagccacccccgactagcaggactccctttcccccaccccgcctgccggccctggagcaggggcccggtgggctctgggtgtggggggccacggctgtggcccagctgctgtggccagcaggcctggggggcccagggggcagccgggcggctgtccttgtccaacagtgggtcagttacgccgacacggagttaataccagctgcctgtggagcaacgctgccggccctgggactccgaagctcggcccaggacccccaggctgtgctgggggccctgggcagggccctgagccccttggaggagtggcttcggctgcacacctacttggccggggaggcccccactctggctgacctggcggctgtcacagccttgctgctgcctttccgatacgtcctagacccacctgcccgccggatctggaataatgtgactcgctggtttgtcacgtgtgtccggcagccagaattccgagccgtgctaggagaagtggttctatactcaggagccaggcctctctctcatcagccaggccccgaggctcctgccctcccaaagacagctgctcagctcaagaaagaggcaaagaaacgggagaagctagagaaattccaacagaagcagaagatccaacagcagcagccacctccaggggagaagaaaccaaaaccagagaagagggagaaacgggatcctggggtcattacctatgacctcccaaccccacccggggaaaagaaagatgtcagtggccccatgcccgactcctacagccctcggtatgtggaggctgcctggtacccttggtgggagcagcagggcttcttcaagccagagtatgggcgtcctaatgtgtcagcagcaaatccccgaggtgtcttcatgatgtgcatcccaccccccaatgtgacaggctccctgcacctgggccatgcactcaccaacgccatccaggactccctgactcgatggcaccgcatgcgtggggagaccaccctgtggaaccctggctgtgaccatgcaggtattgccacccaggtggtggtggagaagaagctatggcgtgagcagggactgagccggcaccagctgggccgcgaggcctttctacaggaagtctggaagtggaaggaggagaaaggtgaccggatttaccaccagttgaagaagcttggcagctccttggactgggatcgagcctgtttcaccatggaccctaaactctcagcagctgtgacagaggcctttgtccggcttcacgaggaaggcatcatctatcgcagtacccgccttgttaactggtcctgcaccctcaactccgccatctctgacattgaggtggataagaaggagctgacaggtcgcaccctgctctccgtgcctggctacaaggagaaggtggagttcggggtcctcgtgtcctttgcctataaggtccaaggctcagatagcgacgaggaggtggtggtggcaacaactcggatcgagacaatgctgggagatgtggctgtagctgtgcaccccaaagataccagataccagcacctgaaggggaagaacgtgatccacccattcctgtctcggagccttcccattgtcttcgatgaatttgtggacatggactttggcacaggtgctgtgaagatcacccccgcacatgaccaaaatgactatgaagttgggcagcggcacgggctggaggccatcagcatcatggactcccggggggccctcatcaatgtgcctccgcctttcctgggcctgcccaggtttgaggccaggaaagcggtgctggtggcgctgaaggagcggggactgttccgtggcattgaggacaaccccatggtggtgccactttgcaaccggtcgaaggacgtggtagagcctctgctgcggccgcagtggtacgttcgctgcggggagatggcccaggctgccagcgccgctgtgactcggggtgacctccgcatcctgcctgaggcccatcagcgcacatggcatgcctggatggacaacatccgggagtggtgcatttccaggcagctgtggtggggccatcgcatcccagcctactttgtcactgtcagtgacccagcggtgccccctggggaggaccctgatgggcggtactgggtgagtggacgcaatgaggcggaggcccgggagaaggcagccaaggagttcggagtgtcccctgacaagatcagtctccagcaagatgaggatgtattggatacctggttctcctctggcctcttccccttatccattttgggctggcccaaccagtcagaagacctgagtgtgttctaccccgggacactgctggagaccggtcatgacatcctcttcttctgggtggcccggatggtcatgctgggcctgaagctcacgggcaggctgccctttagagaggtctacctccatgccatcgtgcgagatgctcacggccggaagatgagcaagtctctaggcaatgtcatcgatcccctggacgtcatctatggaatctccctgcagggcctccacaaccagctgctgaacagcaacctggatcccagcgaggtggagaaggccaaagaagggcagaaagctgacttcccagcggggattcctgaatgtggcaccgatgctctccggtttggattatgtgcctacatgtcccagggtcgtgacatcaacctggatgtgaaccggatactgggttaccgccacttctgcaacaagctctggaatgccaccaagtttgcccttcgtggccttgggaagggttttgtgccctcacccacctcccagcccggaggccatgagagcctggtggaccgctggatccgcagccgcctgacagaggctgtgaggctcagcaatcaaggcttccaggcctacgacttcccggccgtcaccactgcccagtacagcttctggctctatgagctctgtgatgtctacttggagtgcctgaaacctgtactgaatggggtggaccaggtggcagctgagtgtgcccgccagaccctgtacacttgcctggacgttggcctgcggctgctctcacccttcatgcccttcgtgacggaggagctgttccagaggctgccccggaggatgccgcaagctccccctagcctctgtgttaccccctacccggagccctcagagtgctcctggaaggaccccgaggcagaagccgcccttgagctggcgctaagcatcacgcgagccgtgcgctccctgcgggccgactacaacctcacccggatccggcctgactgtttcctggaagtggcggatgaggccacgggcgccctggcatcggcggtgtcgggctacgtgcaggccctggccagcgcaggtgtggtggctgttctggccctgggggctcccgccccccagggttgcgctgtggctctggcttctgatcgctgctccatccacctgcagcttcaggggctggtggaccctgcacgggagctgggcaagctgcaagccaagcgagttgaggcccagcggcaggcccagcgtctgcgggaacgccgtgctgcctcgggctatcctgtcaaggtgccgctcgaagtccaggaggcagatgaagccaagctccaacagacagaagcagagctcaggaaggtggatgaggccatcgccctattccagaagatgctgtgatccaccacccagcttcacccctcacccccagcggctcaccatggggatggcagcaataaaatattttcccacaaaaaaaaaaaaaaaaaa

SEQ ID NO: 519 - DNA, 7802 bp, Homo sapiens
  ref <308>: DATABASE ACCESSION NUMBER: NCBI / NM_006283
  ref <309>: DATABASE ENTRY DATE: 2011-11-26
  ref <313>: RELEVANT RESIDUES IN SEQ ID NO: (1)..(7802)
agctgatgcgcgccccgccggccgggaggcgggagtccgcgagccgggagcgggagcagcagaggtctagcagccgggcgccgcgggccgggggcctgaggaggccacaggacgggcgtcttcccggctagtggagcccggcgcggggcccgctgcggccgcaccgtgaggggaggaggccgaggaggacgcagcgccggctgccggcgggaggaagcgctccaccagggcccccgacggcactcgtttaaccacatccgcgcctctgctggaaacgcttgctggcgcctgtcaccggttccctccattttgaaagggaaaaaggctctccccacccattcccctgcccctaggagctggagccggaggagccgcgctcatggcgttcagcccgtggcagatcctgtcccccgtgcagtgggcgaaatggacgtggtctgcggtacgcggcggggccgccggcgaggacgaggctggcgggcccgagggcgaccccgaggaggaggattcgcaagccgagaccaaatccttgagtttcagctcggattctgaaggtaattttgagactcctgaagctgaaaccccgatccgatcacctttcaaggagtcctgtgatccatcactcggattggcaggacctggggccaaaagccaagaatcacaagaagctgatgaacagcttgtagcagaagtggttgaaaaatgttcatctaagacttgttctaaaccttcagaaaatgaagtgccacagcaggccattgactctcactcagtcaagaatttcagagaagaacctgaacatgattttagcaaaatttccatcgtgaggccattttcaatagaaacgaaggattccacggatatctcggcagtcctcggaacaaaagcagctcatggctgtgtaactgcagtctcaggcaaggctctgccttccagcccgccagacgccctccaggacgaggcgatgacagaaggcagcatgggggtcaccctcgaggcctccgcagaagctgatctaaaagctggcaactcctgtccagagcttgtgcccagcagaagaagcaagctgagaaagcccaagcctgtccccctgaggaagaaagcaattggaggagagttctcagacaccaacgctgctgtggagggcacacctctccccaaggcatcctatcacttcagtcctgaagagttggatgagaacacaagtcctttgctaggagatgccaggttccagaagtctccccctgaccttaaagaaactcccggcactctcagtagtgacaccaacgactcaggggttgagctgggggaggagtcgaggagctcacctctcaagcttgagtttgatttcacagaagatacaggaaacatagaggccaggaaagcccttccaaggaagcttggcaggaaactgggtagcacactgactcccaagatacaaaaagatggcatcagtaagtcagcaggtttagaacagcctacagacccagtggcacgagacgggcctctctcccaaacatcttccaagccagatcctagtcagtgggaaagccccagcttcaacccctttgggagccactctgttctgcagaactccccacccctctcttctgagggctcctaccactttgacccagataactttgacgaatccatggatccctttaaaccaactacgaccttaacaagcagtgacttttgttctcccactggtaatcacgttaatgaaatcttagaatcacccaagaaggcaaagtcgcgtttaataacgagtggctgtaaggtgaagaagcatgaaactcagtctctcgccctggatgcatgttctcgggatgaaggggcagtgatctcccagatttcagacatttctaatagggatggccatgctactgatgaggagaaactggcatccacgtcatgtggtcagaaatcagctggtgccgaggtgaaaggtgagccagaggaagacctggagtactttgaatgttccaatgttcctgtgtctaccataaatcatgcgttttcatcctcagaagcaggcatagagaaggagacgtgccagaagatggaagaagacgggtccactgtgcttgggctgctggagtcctctgcagagaaggcccctgtgtcggtgtcctgtggaggtgagagccccctggatgggatctgcctcagcgaatcagacaagacagccgtgctcaccttaataagagaagagataattactaaagagattgaagcaaatgaatggaagaagaaatacgaagagacccggcaagaagttttggagatgaggaaaattgtagctgaatatgaaaagactattgctcaaatgattgaagatgaacaaaggacaagtatgacctctcagaagagcttccagcaactgaccatggagaaggaacaggccctggctgaccttaactctgtggaaaggtccctttctgatctcttcaggagatatgagaacctgaaaggtgttctggaagggttcaagaagaatgaagaagccttgaagaaatgtgctcaggattacttagccagagttaaacaagaggagcagcgataccaggccctgaaaatccacgcagaagagaaactggacaaagccaatgaagagattgctcaggttcgaacaaaagcaaaggctgagagtgcagctctccatgctggactccgcaaagagcagatgaaggtggagtccctggaaagggccctgcagcagaagaaccaagaaattgaagaactgacaaaaatctgtgatgagctgattgcaaagctgggaaagactgactgagacactccccctgttagctcaacagatctgcatttggctgcttctcttgtgaccacaattatcttgccttatccaggaataattgcccctttgcagagaaaaaaaaaaacttaaaaaaagcacatgcctactgctgcctgtcccgctttgctgccaatgcaacagccctggaagaaaccctagagggttgcatagtctagaaaggagtgtgacctgacagtgctggagcctcctagtttccccctatgaaggttcccttaggctgctgagtttgggtttgtgatttatctttagtttgttttaaagtcatctttactttcccaaatgtgttaaatttgtaactcctctttggggtcttctccaccacctgtctgatttttttgtgatctgtttaatcttttaattttttagtatcagtggttttatttaaggagacagtttggcctattgttacttccaatttataatcaagaaggggctctggatccccttttaaattacacacactctcacacacatacatgtatgtttatagatgctgctgctcttttccctgaagcatagtcaagtaagaactgctctacagaaggacatatttccttggatgtgagaccctattttgaaatagagtcctgactcagaacaccaacttaagaatttgggggattaaagatgtgaagaccacagtcttgggttttcatatctggagaagactatttgccatgacgttttgttgccctggtatttggacactcctcagctttaatgggtgtggcccctttagggttagtcctcagactaatgatagtgtctgctttctgcatgaacggcaatatgggactccctccaagctagggtttggcaagtctgccctagagtcatttactctcctctgcctccatttgttaatacagaatcaacatttagtcttcattatctttttttttttttttgagacagagtttcgatctattttaagtatgtgaagaaaatctacttgtaaaaggctcagatcttaattaaaaggtaattgtagcacattaccaattataaggtgaagaaatgtttttttcccaagtgtgatgcattgttcttcagatgttgaaaagaaagcaaaaaataccttctaacttaagacagaatttttaacaaaatgagcagtaaaagtcacatgaaccactccaaaaatcagtgcattttgcatatttttaaacaaagacagcttgttgaatactgagaagaggagtgcaaggagaaggtctgtactaacaaagccaaattcctcaagctcttactggactcagttcagagtggtgggccattaaccccaacatggaatttttccatataaatctcaatgaattccctttcatttgaataggcaaacccaaatccatgcaagtgttttaaagcactgtcctgtcttaatcttacatgctgaaagtcttcatggtgatatgcactatattcagtatacgtatgttttcctacttctcttgtaaaactgttgcatgatccaacttcagcaatgaattgtgcctagtggagaacctctatagatcttaaaaaatgaattattctttagcagtgtattactcacatgggtgcaatctttagccccagggaggtcaataatgtcttttaaagccagaagtcacattttaccaatatgcatttatcataattggtgcttaggctgtatattcaagcctgttgtcttaacattttgtataaaaaagaacaacagaaattatctgtcatttgagaagtggcttgacaatcatttgagctttgaaagcagtcactgtggtgtaatatgaatgctgtcctagtggtcatagtaccaagggcacgtgtctccccttggtataactgatttcctttttagtcctctactgctaaataagttaattttgcattttgcagaaagaaacattgattgctaaatctttttgctgctgtgttttggtgttttcatgtttacttgttttatattgatctgttttaagtatgagaggcttatagtgccctccattgtaaatccatagtcatctttttaagcttattgtgtttaagaaagtagctatgtgttaaacagaggtgatggcagcccttccctagcacactggtggaagagaccccttaagaacctgaccccagtgaatgaagctgatgcacagggagcaccaaaggaccttcgttaagtgataattgtcctggcctctcagccatgaccgttatgaggaaatatcccccattcgaacttaacagatgcctcctctccaaagagaattaaaatcgtagcttgtacagatcaagagaatatactgggcagaatgaagtatgtttgtttatttttctttaaaaataaaggattttggaactctggagagtaagaatatagtatagagtttgcctcaacacatgtgagggccaaataacctgctagctaggcagtaataaactctgttacagaagagaaaaagggccgggcacagtggcttattcctgtaatcccaacactgtggaaggccgaggcaggaggatcacttgagtccaggagtttgaaacctacctaggcaacatggtgaaaccttgtctctaccaaaataaaaattagctgggcatggtggcacgtgcctgtggtcccagctacttgggaggctgaggtgggagcctgggaggtcaaggctgcagtgagccatgatcatgccactgcactccatcctgggtgacagcaagatcttgtctcaaaaaaaaaaaaaaaaaaaaaaaaaccaggagtgaaaaaggaaagtagaaggcagctgctggcctagatgttggtttgggaatattaggtgatcctgttgagattctggatccagagcaatttctttagcttttgactttgccaaagtgtagatagcctttatccagcagtattttaagtggggaatgcaacgtgaggccaactgaacaattccccccgtggctgcccagatagtcacagtcaaggttggagagtctccttccagccagtgacctacccaaaccttttgttctgtaaaactgctctggaaataccgggaagcccagttttctcacgtggtttctagcttcttcagactcagcccaaattaggaagtgcagaagcacatgatggtgaaaaacctaggatttggcagccttccagaatggtatggaatctgagggaagatttatgtttcgttttggaggatagctcaagttgaattttctttccagccagttaccctttcaacctacccatactttgtacaactcttacacaaatacttagatatttattagatagccctgaattcactctaattataaacagggagtgtaaactgcccccagatgttcctgggctgggtaaaagcagctggagtgaagcactcattttccataaaggtaacaaagggcagctcagtggttactcaagctcaaaagggtttttttaagagcaagcattggttaagtctgtgtatactgagttggaagtgatttcagcacattcttttttagtggagtgaaagttctgaagcccccttttaacttcctcttggtttttcattataattggtagccatctcatgaactgtctctgactgttgtctctttgtggtcatgtgattgtgagcttgctttctgacttgcatttctgactttatcctgttgttaggaagatagaaactaggttttgaaagattacatgattcaagcgagggattttaaagtaaagatgtatttattctgaagaatctaaaagataacagattatttgcttatgaaagaacaatatagtctgggaatcccagaatgtcaagccaaaggtctaagaagtcatctccttcaaatactttaataaagaagtatttcgaggagatatctgtccaaaaaggtttgactggcctccagattccagttatttttaaaaagcaacttaccactaaatccttgagtctccatagagtaacagtaaagaaactgatgtaacagactctcctctcaaaggatctcctctggaagagactatcagcggcagcattctccagggaagacccatcccctagtgccagagcttgcatcctggagactaaagattgcacttttttgtagttttttgtccaaatgcaatcccatttctgtgcctcttagcatgcagttagatttggacaaacaagattcctaaggaatgactttattaactataatatggttacagctattatataaatatatattctggttatagttctaatatggagatgttgtgtgcaatgctggcctgtggtggtctgtgtaatgctttaacttgtatggaggaggccaggctcagagctgagatgtggcctgaaccttccctgtatcgatcctttaatttagaactgtcaagatgtcactttctccccctctgccttttagtggtatctgacatatactcaaaacagtaatttcctggtcacatcattaactgctaattctgtatttataaagaattttcagatggacatgtacaaatttgaactcaaaccatccccagtccagatacagggcagcgtgtaggtgaccacaccagagcctcagcctcggtccttctcagccgtcgggataggatccaggcatttcttttaaatctcagaggtagcagtaaacttttcagtattgctgttagcaagtgtgtgtttgccaatagatacccattatactaatgtgccaagtaaatgttcattgcacatctgcttccactgtgttcccacgggtgccatgaagtgtgtgaggagcccctcatctggagggatgagtgctgcgttgactactgctatcaggattgtgttgtgtggaatattcatctacataaattttatatgcacagtaatttccctttttatatgtcaagtaactatttgtaaaagttatactcacaaattattataatgattactaatatattttttccatgtttcattgcctgaataaaaactgtttaccactgtta

SEQ ID NO: 520 - DNA, 1138 bp, Homo sapiens
  ref <308>: DATABASE ACCESSION NUMBER: NCBI / NM_006221
  ref <309>: DATABASE ENTRY DATE: 2011-12-25
  ref <313>: RELEVANT RESIDUES IN SEQ ID NO: (1)..(1138)
ggaccgttagggagcccaatgggcgtcgccgccaggccccgttgcagagcgcgtctagccaataggcagcggcggcgggcgggcgcgggcgacaggcggcgcagctgaggcggagcaggcgctgcggcaggagggaagatggcggacgaggagaagctgccgcccggctgggagaagcgcatgagccgcagctcaggccgagtgtactacttcaaccacatcactaacgccagccagtgggagcggcccagcggcaacagcagcagtggtggcaaaaacgggcagggggagcctgccagggtccgctgctcgcacctgctggtgaagcacagccagtcacggcggccctcgtcctggcggcaggagaagatcacccggaccaaggaggaggccctggagctgatcaacggctacatccagaagatcaagtcgggagaggaggactttgagtctctggcctcacagttcagcgactgcagctcagccaaggccaggggagacctgggtgccttcagcagaggtcagatgcagaagccatttgaagacgcctcgtttgcgctgcggacgggggagatgagcgggcccgtgttcacggattccggcatccacatcatcctccgcactgagtgagggtggggagcccaggcctggcctcggggcagggcagggcggctaggccggccagctcccccttgcccgccagccagtggccgaaccccccactccctgccaccgtcacacagtatttattgttcccacaatggctgggagggggcccttccagattgggggccctggggtccccactccctgtccatccccagttggggctgcgaccgccagattctcccttaaggaattgacttcagcaggggtgggaggctcccagacccagggcagtgtggtgggaggggtgttccaaagagaaggcctggtcagcagagccgccccgtgtccccccaggtgctggaggcagactcgagggccgaattgtttctagttaggccacgctcctctgttcagtcgcaaaggtgaacactcatgcggcccagccatgggccctctgagcaactgtgcagcaccctttcacccccaattaaacccagaaccactgctctgcaaaaaaaaaaaaaaaaaa

SEQ ID NO: 521 - DNA, 4109 bp, Homo sapiens
  ref <308>: DATABASE ACCESSION NUMBER: NCBI / NM_006148
  ref <309>: DATABASE ENTRY DATE: 2011-12-24
  ref <313>: RELEVANT RESIDUES IN SEQ ID NO: (1)..(4109)
gcagtcagcctgagagcgctgaggcgccagcaccgcgggccccgccgtccccccaggaacccgcccccgcgcagccccacgtcgcccggagagcgcgcctcgctgcgcgtgcccttgcccgcgcccgaggcgcgtgcccgccccagtgcagcccctcctccccgctgtgtttattaggggaaggagggcggaggcggaggccagttccccagctccagccgccgtcgctgctgcctgtgtagttgcagccgcggccgcctcccgccagctcgcctcggggaacaggacgcgcgtgagctcaggcgtccccgccccagcttttctcggaaccatgaaccccaactgcgcccggtgcggcaagatcgtgtatcccacggagaaggtgaactgtctggataagttctggcataaagcatgcttccattgcgagacctgcaagatgacactgaacatgaagaactacaagggctacgagaagaagccctactgcaacgcacactaccccaagcagtccttcaccatggtggcggacaccccggaaaaccttcgcctcaagcaacagagtgagctccagagtcaggtgcgctacaaggaggagtttgagaagaacaagggcaaaggtttcagcgtagtggcagacacgcccgagctccagagaatcaagaagacccaggaccagatcagtaacataaaataccatgaggagtttgagaagagccgcatgggccctagcgggggcgagggcatggagccagagcgtcgggattcacaggacggcagcagctaccggcggcccctggagcagcagcagcctcaccacatcccgaccagtgccccggtttaccagcagccccagcagcagccggtggcccagtcctatggtggctacaaggagcctgcagccccagtctccatacagcgcagcgccccaggtggtggcgggaagcggtaccgcgcggtgtatgactacagcgccgccgacgaggacgaggtctccttccaggacggggacaccatcgtcaacgtgcagcagatcgacgacggctggatgtacgggacggtggagcgcaccggcgacacggggatgctgccggccaactacgtggaggccatctgaacccgcagcgcccccatctgtcttcagcacattccacggcatcgcatccgtcctgggcgtgacccgtccattcttcagtgtctctgttttttaaaacctgcgacagcttgtgattcctacccctcttccagcttcttttgccaactgaagccttcttctgccacttctgcgggctccctcctctggcaggcttcccccttgatcgacttcttggttttctctctggatggaacgggcatgggcctctctgggggaggcagggctggaatgggagacctgttggcctgtgggcctcacctgcccctctgttctctcccctcacatcctcctgcccagctcctcacatacccacacattccagggctggggtgagcctgactgccaggaccccaggtcaggggctccctacattccccagagtgggatccacttcttggttcctgggatggcgatggggactctgccgctgtgtagggaccagtgggatgggctctacctctctttctcaaagagggggctctgcccacctggggtctctctccctacctccctcctcaggggcaacaacaggagaatggggttcctgctgtggggcgaattcatcccctccccgcgcgttccttcgcacactgtgattttgccctcctgcccacgcagacctgcagcgggcaaagagctcccgaggaagcacagcttgggtcaggttcttgcctttcttaattttagggacagctaccggaaggaggggaacaaggagttctcttccgcagcccctttccccacgcccacccccagtctccagggacccttgcctgcctcctaggctggaagccatggtcccgaagtgtagggcaagggtgcctcaggaccttttggtcttcagcctccctcagcccccaggatctgggttaggtggccgctcctccctgctcctcatgggaagatgtctcagagccttccatgacctcccctccccagcccaatgccaagtggacttggagctgcacaaagtcagcagggaccactaaatctccaagacctggtgtgcggaggcaggagcatgtatgtctgcaggtgtctgacacgcaagtgtgtgagtgtgagtgtgagagatggggcgggggtgtgtctgtaggtgtctctgggcctgtgtgtgggtggggttatgtgagggtatgaagagctgtcttcccctgagagtttcctcagaacccacagtgagaggggagggctcctggggcagagaagttccttaggttttctttggaatgaaattcctccttccccccatctctgagtggaggaagcccaccaatctgccctttgcagtgtgcagggtggaaggtaagaggttggtgtggagttggggctgccatagggtctgcagcctgctggggctaagcggtggaggaaggctctgtcactccaggcatatgtttccccatctctgtctggggctacagaatagggtggcagaagtgtcaccctgtgggtgtctccctcgggggctcttcccctagacctccccctcacttacataaagctcccttgaagcaagaaagagggtcccagggctgcaaaactggaagcacagcctcggggatggggagggaaagacggtgctatatccagttcctgctctctgctcatgggtggctgtgacaaccctggcctcacttgattcatctctggttttcttgccaccctctgggagtccccatcccattttcatcctgagcccaaccaggccctgccattggcctcttgtcccttggcacacttgtacccacaggtgaggggcaggacctgaaggtattggcctgttcaacaatcagtcatcatgggtgtttttgtcaactgcttgttaattgatttggggatgtttgccccgaatgagaggttgaggaaaagactgtgggtggggaggccctgcctgacccatcccttttcctttctggccccagcctaggtggaggcaagtggaatatcttatattgggcgatttgggggctcggggaggcagagaatctcttgggagtcttgggtggcgctggtgcattctgtttcctcttgatctcaaagcacaatgtggatttggggaccaaaggtcagggacacatccccttagaggacctgagtttgggagagtggtgagtggaagggaggagcagcaagaagcagcctgttttcactcagcttaattctccttcccagataaggcaagccagtcatggaatcttgctgcaggccctccctctactcttcctgtcctaaaaataggggccgttttcttacacacccccagagagaggagggactgtcacactggtgctgagtgaccgggggctgctgggcgtctgttctttaccaaaaccatccatccctagaagagcacagagccctgaggggctgggctgggctgggctgagcccctggtcttctctacagttcacagaggtctttcagctcatttaatcccaggaaagaggcatcaaagctagaatgtgaatataacttttgtggaccaatactaagaataacaagaagcccagtggtgaggaaagtgcgttctcccagcactgcctcctgttttctccctctcatgtccctccagggaaaatgactttattgcttaatttctgcctttcccccctcacacatgcacttttgggcctttttttatagctggaaaaaacaaaataccaccctacaaacctgtatttaaaaagaaacagaaatgaccacgtgaaatttgcctctgtccaaacatttcatccgtgtgtatgtgtatgtgtgtgagtgtgtgaagccgccagttcatctttttatatggggttgttgtctcattttggtctgttttggtcccctccctcgtgggcttgtgctcgggatcaaacctttctggcctgttatgattctgaacatttgacttgaaccacaagtgaatctttctcctggtgactcaaataaaagtataatttttacctgcgga

SEQ ID NO: 522 - DNA, 599 bp, Homo sapiens
  ref <308>: DATABASE ACCESSION NUMBER: NCBI / NM_005954
  ref <309>: DATABASE ENTRY DATE: 2011-12-18
  ref <313>: RELEVANT RESIDUES IN SEQ ID NO: (1)..(599)
cccggcagtgcacacacacggcaggggcgggcgacagatgcagtgcgtgcgccggagcccaagcgcacaaacggaaagagcgggcgcggtgcgcaggggcgggcgcccagcgggcttggcatgcgcgcccccgcccgaggctataaaagcatcgccacctgctgccactagccaagccgcgcgtccagttgcttggagaagcccgttcaccgcctccagctgctgctctcctcgacatggaccctgagacctgcccctgcccttctggtggctcctgcacctgcgcggactcctgcaagtgcgagggatgcaaatgcacctcctgcaagaagagctgctgctcctgctgccctgcggagtgtgagaagtgtgccaaggactgtgtgtgcaaaggcggagaggcagctgaggcagaagcagagaagtgcagctgctgccagtgagaaggcacccctccgtgtggagcacgtggagatagtgccaggtggctcagtgccacctatgcctgtggtgaagtgtggctggtgtccccttcccctgctgaccttggaggaatgacaataaatcccatgaacagcatgaaaaaaaaaaaaaaaaaa

SEQ ID NO: 523 - DNA, 1224 bp, Homo sapiens
  ref <308>: DATABASE ACCESSION NUMBER: NCBI / NM_006003
  ref <309>: DATABASE ENTRY DATE: 2011-11-26
  ref <313>: RELEVANT RESIDUES IN SEQ ID NO: (1)..(1224)
atttcctttccggcggcgcgctgtcgtcacgcgtcccgcgcctcctcgcgcctgcgccgtggttggaaggtcgtccctgtgaccggcttggcggttggagcggctgtcgccatgttgtcggtagcatcccgctcaggcccgttcgcgcccgtcctgtcggccacgtcccgcggggtggcgggcgcgctgcggcccttggtgcaggccacggtgcccgccaccccggagcagcctgtgttggacctgaagcggcccttcctcagccgggagtcgctgagcggccaggccgtgcgccggcctttggtcgcctccgtgggcctcaatgtccctgcttctgtttgttattcccacacagacatcaaggtgcctgacttctctgaataccgccgccttgaagttttagatagtacgaagtcttcaagagaaagcagcgaggctaggaaaggtttctcctatttggtaactggagtaactactgtgggtgtcgcatatgctgccaagaatgccgtcacccagttcgtttccagcatgagtgcttctgctgatgtgttggccctggcgaaaatcgaaatcaagttatccgatattccagaaggcaagaacatggctttcaaatggagaggcaaacccctgtttgtgcgtcatagaacccagaaggaaattgagcaggaagctgcagttgaattatcacagttgagggacccacagcatgatctagatcgagtaaagaaacctgaatgggttatcctgataggtgtttgcactcatcttggctgtgtacccattgcaaatgcaggagattttggtggttattactgcccttgccatgggtcacactatgatgcatctggcaggatcagattgggtcctgctcctctcaaccttgaagtccccacgtatgagttcaccagtgacgatatggtgattgttggttaagagacttggactcaagtcataggcttctttcagtctttatgtcacctcaggagacttatttgagaggaagccttctgtacttgaagttgatttgaaatatgtaagaattgatgatgtatttgcaaacattaatgtgaaataaattgaatttaatgttgaatactttcaggcattcacttaataaagacactgttaagcactgttatgctcagtcatacacgcgaaaggtacaatgtcttttagctaattctaattaaaaattacagactggtgtacaagatacttgtg

SEQ ID NO: 524 - DNA, 2107 bp, Homo sapiens
  ref <308>: DATABASE ACCESSION NUMBER: NCBI / NM_005998
  ref <309>: DATABASE ENTRY DATE: 2011-11-28
  ref <313>: RELEVANT RESIDUES IN SEQ ID NO: (1)..(2107)
ctaacttgtctggccgttcttgcgtagggggcgggactaaggctgtcaattggtctgtttttgtgccgatcaatgagatgggtgcggtgattggcgactaccttgagagtagcgggttgaggtgtaagccctgaggaggcagcgttttctgggcttctgtctggttctctctctccagaaggttctgccggttcccccagctctgggtacccggctctgcatcgcgtcgccatgatgggccatcgtccagtgctcgtgctcagccagaacacaaagcgtgaatccggaagaaaagttcaatctggaaacatcaatgctgccaagactattgcagatatcatccgaacatgtttgggacccaagtccatgatgaagatgcttttggacccaatgggaggcattgtgatgaccaatgatggcaatgccattcttcgagagattcaagtccagcatccagcggccaagtccatgatcgaaattagccggacccaggatgaagaggttggagatgggaccacatcagtaattattcttgcaggggaaatgctgtctgtagctgagcacttcctggagcagcagatgcacccaacagtggtgatcagtgcttaccgcaaggcattggatgatatgatcagcaccctaaagaaaataagtatcccagtcgacatcagtgacagtgatatgatgctgaacatcatcaacagctctattactaccaaagccatcagtcggtggtcatctttggcttgcaacattgccctggatgctgtcaagatggtacagtttgaggagaatggtcggaaagagattgacataaaaaaatatgcaagagtggaaaagatacctggaggcatcattgaagactcctgtgtcttgcgtggagtcatgattaacaaggatgtgacccatccacgtatgcggcgctatatcaagaaccctcgcattgtgctgctggattcttctctggaatacaagaaaggagaaagccagactgacattgagattacacgagaggaggacttcacccgaattctccagatggaggaagagtacatccagcagctctgtgaggacattatccaactgaagcccgatgtggtcatcactgaaaagggcatctcagatttagctcagcactaccttatgcgggccaatatcacagccatccgcagagtccggaagacagacaataatcgcattgctagagcctgtggggcccggatagtcagccgaccagaggaactgagagaagatgatgttggaacaggagcaggcctgttggaaatcaagaaaattggagatgaatactttactttcatcactgactgcaaagaccccaaggcctgcaccattctcctccggggggctagcaaagagattctctcggaagtagaacgcaacctccaggatgccatgcaagtgtgtcgcaatgttctcctggaccctcagctggtgccagggggtggggcctccgagatggctgtggcccatgccttgacagaaaaatccaaggccatgactggtgtggaacaatggccatacagggctgttgcccaggccctagaggtcattcctcgtaccctgatccagaactgtggggccagcaccatccgtctacttacctcccttcgggccaagcacacccaggagaactgtgagacctggggtgtaaatggtgagacgggtactttggtggacatgaaggaactgggcatatgggagccattggctgtgaagctgcagacttataagacagcagtggagacggcagttctgctactgcgaattgatgacatcgtttcaggccacaaaaagaaaggcgatgaccagagccggcaaggcggggctcctgatgctggccaggagtgagtgctaggcaaggctacttcaatgcacagaaccagcagagtctccccttttcctgagccagagtgccaggaacactgtggacgtctttgttcagaagggatcaggttggggggcagcccccagtccctttctgtcccagctcagttttccaaaagacactgacatgtaattcttctctattgtaaggtttccatttagtttgcttccgatgattaaatctaagtcatttgagaaagtt

SEQ ID NO: 525 - DNA, 1324 bp, Homo sapiens
  ref <308>: DATABASE ACCESSION NUMBER: NCBI / NM_005997
  ref <309>: DATABASE ENTRY DATE: 2011-11-20
  ref <313>: RELEVANT RESIDUES IN SEQ ID NO: (1)..(1324)
ctggtgaggggctgcaggtggcggcgcagtctcggtaggcggtatgagtttggctgggggccgggcaccccggaagaccgctgggaaccggctttctgggcttttggaggcagaggaggaagatgagttctaccagacgacttatgggggtttcacagaggaatccggagatgatgagtatcaaggggaccagtcagacacagaggacgaagtggactctgactttgacattgatgaaggggatgaaccatccagtgatggagaagcagaagagccaagaaggaagcgccgagtagtcaccaaggcctataaggaacctctcaagagcttaaggcctcgaaaggtcaacaccccggctggtagctctcagaaggcgcgagaagagaaggcactactgccattagaactacaagatgacggctctgacagtcggaagtctatgcgtcagtctacagctgagcatacacgacaaacgttccttcgggtacaggagaggcagggccagtcaagacggcgaaaggggccccactgtgagcggccactaacccaggaggaactgctccgggaggccaagatcacagaagagcttaatttacggtcactggagacatatgagcggctcgaggctgataaaaagaagcaggttcataagaagcggaagtgccccgggcccataatcacctatcattcagtgacagtgccacttgttggggagccaggccccaaggaagagaacgttgacatagaaggacttgatcctgctccctcggtgtctgcattgactcctcatgctgggactggacccgtcaacccccctgctcgctgctcacgtaccttcatcacttttagtgatgatgcaactttcgaggaatggttcccccaagggcggcccccaaaagtccctgttcgtgaggtctgtccagtgacccatcgtccagccctataccgggaccctgttacagacataccctatgccactgctcgagccttcaagatcattcgtgaggcttacaagaagtacattactgcccatggactgccgcccactgcctcagccctgggccccggcccgccacctcctgagcccctccctggctctgggccccgagccttgcgccagaaaattgtcattaaatgaagagatgtctagtcctcagaaacttctttcctgccctgattggggctcttgctgttccgtttcttctccctgcttctcccctttgtcatctctgatctttgcctaatctgtttctttttccttttcccctagttcttacaggtttcgttgtgttttttaatctaataaaatagaaagatccctttt

SEQ ID NO: 526 - DNA, 3580 bp, Homo sapiens
  ref <308>: DATABASE ACCESSION NUMBER: NCBI / NM_005629
  ref <309>: DATABASE ENTRY DATE: 2011-11-27
  ref <313>: RELEVANT RESIDUES IN SEQ ID NO: (1)..(3580)
gccgggccccgccgccgcccgcgcgcccccgggcccccgacacacatgagattcttcaggctcactttcaagtgcttcgtggactgcttctgactgcgccgcccgcgccccgcaccccgccgcccgcccgccgccccgtcccccggcccggccgccccccggcccccggccggcccgcgccctcggggccctccccggtgccgccggtgccccccgcctgaccgccgccccccgtgaggcgccgcgaccccggcccggccgtgcggcccgccgaggccatggcgaagaagagcgccgagaacggcatctatagcgtgtccggcgacgagaagaagggccccctcatcgcgcccgggcccgacggggccccggccaagggcgacggccccgtgggcctggggacacccggcggccgcctggccgtgccgccgcgcgagacctggacgcgccagatggacttcatcatgtcgtgcgtgggcttcgccgtgggcttgggcaacgtgtggcgcttcccctacctgtgctacaagaacggcggaggtgtgttccttattccctacgtcctgatcgccctggttggaggaatccccattttcttcttagagatctcgctgggccagttcatgaaggccggcagcatcaatgtctggaacatctgtcccctgttcaaaggcctgggctacgcctccatggtgatcgtcttctactgcaacacctactacatcatggtgctggcctggggcttctattacctggtcaagtcctttaccaccacgctgccctgggccacatgtggccacacctggaacactcccgactgcgtggagatcttccgccatgaagactgtgccaatgccagcctggccaacctcacctgtgaccagcttgctgaccgccggtcccctgtcatcgagttctgggagaacaaagtcttgaggctgtctgggggactggaggtgccaggggccctcaactgggaggtgaccctttgtctgctggcctgctgggtgctggtctacttctgtgtctggaagggggtcaaatccacgggaaagatcgtgtacttcactgctacattcccctacgtggtcctggtcgtgctgctggtgcgtggagtgctgctgcctggcgccctggatggcatcatttactatctcaagcctgactggtcaaagctggggtcccctcaggtgtggatagatgcggggacccagattttcttttcttacgccattggcctgggggccctcacagccctgggcagctacaaccgcttcaacaacaactgctacaaggacgccatcatcctggctctcatcaacagtgggaccagcttctttgctggcttcgtggtcttctccatcctgggcttcatggctgcagagcagggcgtgcacatctccaaggtggcagagtcagggccgggcctggccttcatcgcctacccgcgggctgtcacgctgatgccagtggccccactctgggctgccctgttcttcttcatgctgttgctgcttggtctcgacagccagtttgtaggtgtggagggcttcatcaccggcctcctcgacctcctcccggcctcctactacttccgtttccaaagggagatctctgtggccctctgttgtgccctctgctttgtcatcgatctctccatggtgactgatggcgggatgtacgtcttccagctgtttgactactactcggccagcggcaccaccctgctctggcaggccttttgggagtgcgtggtggtggcctgggtgtacggagctgaccgcttcatggacgacattgcctgtatgatcgggtaccgaccttgcccctggatgaaatggtgctggtccttcttcaccccgctggtctgcatgggcatcttcatcttcaacgttgtgtactacgagccgctggtctacaacaacacctacgtgtacccgtggtggggtgaggccatgggctgggccttcgccctgtcctccatgctgtgcgtgccgctgcacctcctgggctgcctcctcagggccaagggcaccatggctgagcgctggcagcacctgacccagcccatctggggcctccaccacttggagtaccgagctcaggacgcagatgtcaggggcctgaccaccctgaccccagtgtccgagagcagcaaggtcgtcgtggtggagagtgtcatgtgacaactcagctcacatcaccagctcacctctggtagccatagcagcccctgcttcagccccaccgcacccctccagggggcctgcctttccctgacacttttggggtctgcctgggggaggaggggagaaagcaccatgagtgctcactaaaacaactttttccatttttaataaaacgccaaaaatatcacaacccaccaaaaatagatgcctctccccctccagccctagccgagctggtcctaggccccgcctagtgccccacccccacccacagtgctgcactcctcctgcccctgccacgcccaccccctgcccacctctccaggctctgctctgcagcacacccgtgggtgacccctcaccccagaagcagcagtggcagcttgggaaatgtgaggaagggaaggagggagagacgggagggaggagagagaggagaagggaggcaggggaggggcagcagaaccaaggcaaatatttcagctgggctatacccctctccccatccctgttatagaagcttagagagccagccagcaatggaaccttctggttcctgcgccaatcgccaccagtatcaattgtgtgagcttgggtgcgagtgcacgcgtgcgtgagtacggagagtatatatagatctctatctcttagcaaaggtgaatgccagatgtaaatggcgcctctgggcaaaggaggcttgtattttgcacattttataaaaacttgagagaatgagatttctgcttgtatatttctaaaaagaggaaggagcccaaaccatcctctccttaccactcccatccctgtgagccctaccttacccctctgcccctagccaaggagtgtgaatttatagatctaactttcataggcaaaacaaaagcttcgagctgttgcgtgtgtgagtctgttgtgtggatgtgcgtgtgtggtccccagccccagactggattggaaaagtgcatggtgggggcctcggggctgtccccacgctgtccctttgccacaagtctgtggggcaagaggctgcaatattccgtcctgggtgtctgggctgctaacctggcctgctcaggcttcccaccctgtgcggggcacacccccaggaagggaccctggacacggctcccacgtccaggcttaaggtggatgcacttcccgcacctccagtcttctgtgtagcagctttaacccacgtttgtctgtcacgtccagtcccgagacggctgagtgaccccaagaaaggcttccccgacacccagacagaggctgcagggctggggctgggtgagggtggcgggcctgcggggacattctactgtgctaaaaagccactgcagacatagcaataaaaacatgtcattttccaaagcaggaaaaaaaaaaaaaaa

SEQ ID NO: 527 - DNA, 2017 bp, Homo sapiens
  ref <308>: DATABASE ACCESSION NUMBER: NCBI / NM_005548
  ref <309>: DATABASE ENTRY DATE: 2011-11-26
  ref <313>: RELEVANT RESIDUES IN SEQ ID NO: (1)..(2017)
aaattaacgtactatcctccttacttttgggtcgggccctccgggaagatggcggccgtgcaggcggccgaggtgaaagtggatggcagcgagccgaaactgagcaagaatgagctgaagagacgcctgaaagctgagaagaaagtagcagagaaggaggccaaacagaaagagctcagtgagaaacagctaagccaagccactgctgctgccaccaaccacaccactgataatggtgtgggtcctgaggaagagagcgtggacccaaatcaatactacaaaatccgcagtcaagcaattcatcagctgaaggtcaatggggaagacccatacccacacaagttccatgtagacatctcactcactgacttcatccaaaaatatagtcacctgcagcctggggatcacctgactgacatcaccttaaaggtggcaggtaggatccatgccaaaagagcttctgggggaaagctcatcttctatgatcttcgaggagagggggtgaagttgcaagtcatggccaattccagaaattataaatcagaagaagaatttattcatattaataacaaactgcgtcggggagacataattggagttcaggggaatcctggtaaaaccaagaagggtgagctgagcatcattccgtatgagatcacactgctgtctccctgtttgcatatgttacctcatcttcactttggcctcaaagacaaggaaacaaggtatcgccagagatacttggacttgatcctgaatgactttgtgaggcagaaatttatcatccgctctaagatcatcacatatataagaagtttcttagatgagctgggattcctagagattgaaactcccatgatgaacatcatcccagggggagccgtggccaagcctttcatcacttatcacaacgagctggacatgaacttatatatgagaattgctccagaactctatcataagatgcttgtggttggtggcatcgaccgggtttatgaaattggacgccagttccggaatgaggggattgatttgacgcacaatcctgagttcaccacctgtgagttctacatggcctatgcagactatcacgatctcatggaaatcacggagaagatggtttcagggatggtgaagcatattacaggcagttacaaggtcacctaccacccagatggcccagagggccaagcctacgatgttgacttcaccccacccttccggcgaatcaacatggtagaagagcttgagaaagccctggggatgaagctgccagaaacgaacctctttgaaactgaagaaactcgcaaaattcttgatgatatctgtgtggcaaaagctgttgaatgccctccacctcggaccacagccaggctccttgacaagcttgttggggagttcctggaagtgacttgcatcaatcctacattcatctgtgatcacccacagataatgagccctttggctaaatggcaccgctctaaagagggtctgactgagcgctttgagctgtttgtcatgaagaaagagatatgcaatgcgtatactgagctgaatgatcccatgcggcagcggcagctttttgaagaacaggccaaggccaaggctgcaggtgatgatgaggccatgttcatagatgaaaacttctgtactgccctggaatatgggctgccccccacagctggctggggcatgggcattgatcgagtcgccatgtttctcacggactccaacaacatcaaggaagtacttctgtttcctgccatgaaacccgaagacaagaaggagaatgtagcaaccactgatacactggaaagcacaacagttggcacttctgtctagaaaataataattgcaagttgtataactcaggcgtctttgcatttctgcgaaagatcaaggtctgcaagggaattcttgtgtgctgctttccatttgacaccgcagttctgttcagccatcagaagagagacaaggaattaaaaatttctttttaatcctgttaccaaataaaaaa

SEQ ID NO: 528 - DNA, 2312 bp, Homo sapiens
  ref <308>: DATABASE ACCESSION NUMBER: NCBI / NM_005545
  ref <309>: DATABASE ENTRY DATE: 2011-10-22
  ref <313>: RELEVANT RESIDUES IN SEQ ID NO: (1)..(2312)
aagcagttgttttgctggaaggagggagtgcgcgggctgccccgggctcctccctgccgcctcctctcagtggatggttccaggcaccctgtctggggcagggagggcacaggcctgcacatcgaaggtggggtgggaccaggctgcccctcgccccagcatccaagtcctcccttgggcgcccgtggccctgcagactctcagggctaaggtcctctgttgctttttggttccaccttagaagaggctccgcttgactaagagtagcttgaaggaggcaccatgcaggagctgcatctgctctggtgggcgcttctcctgggcctggctcaggcctgccctgagccctgcgactgtggggaaaagtatggcttccagatcgccgactgtgcctaccgcgacctagaatccgtgccgcctggcttcccggccaatgtgactacactgagcctgtcagccaaccggctgccaggcttgccggagggtgccttcagggaggtgcccctgctgcagtcgctgtggctggcacacaatgagatccgcacggtggccgccggagccctggcctctctgagccatctcaagagcctggacctcagccacaatctcatctctgactttgcctggagcgacctgcacaacctcagtgccctccaattgctcaagatggacagcaacgagctgaccttcatcccccgcgacgccttccgcagcctccgtgctctgcgctcgctgcaactcaaccacaaccgcttgcacacattggccgagggcaccttcaccccgctcaccgcgctgtcccacctgcagatcaacgagaaccccttcgactgcacctgcggcatcgtgtggctcaagacatgggccctgaccacggccgtgtccatcccggagcaggacaacatcgcctgcacctcaccccatgtgctcaagggtacgccgctgagccgcctgccgccactgccatgctcggcgccctcagtgcagctcagctaccaacccagccaggatggtgccgagctgcggcctggttttgtgctggcactgcactgtgatgtggacgggcagccggcccctcagcttcactggcacatccagatacccagtggcattgtggagatcaccagccccaacgtgggcactgatgggcgtgccctgcctggcacccctgtggccagctcccagccgcgcttccaggcctttgccaatggcagcctgcttatccccgactttggcaagctggaggaaggcacctacagctgcctggccaccaatgagctgggcagtgctgagagctcagtggacgtggcactggccacgcccggtgagggtggtgaggacacactggggcgcaggttccatggcaaagcggttgagggaaagggctgctatacggttgacaacgaggtgcagccatcagggccggaggacaatgtggtcatcatctacctcagccgtgctgggaaccctgaggctgcagtcgcagaaggggtccctgggcagctgcccccaggcctgctcctgctgggccaaagcctcctcctcttcttcttcctcacctccttctagccccacccagggcttccctaactcctccccttgcccctaccaatgcccctttaagtgctgcaggggtctggggttggcaactcctgaggcctgcatgggtgacttcacattttcctacctctccttctaatctcttctagagcacctgctatccccaacttctagacctgctccaaactagtgactaggatagaatttgatcccctaactcactgtctgcggtgctcattgctgctaacagcattgcctgtgctctcctctcaggggcagcatgctaacggggcgacgtcctaatccaactgggagaagcctcagtggtggaattccaggcactgtgactgtcaagctggcaagggccaggattgggggaatggagctggggcttagctgggaggtggtctgaagcagacagggaatgggagaggaggatgggaagtagacagtggctggtatggctctgaggctccctggggcctgctcaagctcctcctgctccttgctgttttctgatgatttgggggcttgggagtccctttgtcctcatctgagactgaaatgtggggatccaggatggccttccttcctcttacccttcctccctcagcctgcaacctctatcctggaacctgtcctccctttctccccaactatgcatctgttgtctgctcctctgcaaaggccagccagcttgggagcagcagagaaataaacagcatttctgatgccaaaaaaaaaaaaaaaaa

SEQ ID NO: 529 - DNA, 1260 bp, Homo sapiens
  ref <308>: DATABASE ACCESSION NUMBER: NCBI / NM_005507
  ref <309>: DATABASE ENTRY DATE: 2011-12-18
  ref <313>: RELEVANT RESIDUES IN SEQ ID NO: (1)..(1260)
ggccggcgggaagactccgttacccagcgagcgaggcggcggcgcagggccagcggactccatttcccgtcggctcgcggtgggagcgccggaagcccgccccacccctcattgtgcggctcctactaaacggaaggggccgggagaggccgcgttcagtcgggtcccggcagcggctgcagcgctctcgtcttctgcggctctcggtgccctctccttttcgtttccggaaacatggcctccggtgtggctgtctctgatggtgtcatcaaggtgttcaacgacatgaaggtgcgtaagtcttcaacgccagaggaggtgaagaagcgcaagaaggcggtgctcttctgcctgagtgaggacaagaagaacatcatcctggaggagggcaaggagatcctggtgggcgatgtgggccagactgtcgacgacccctacgccacctttgtcaagatgctgccagataaggactgccgctatgccctctatgatgcaacctatgagaccaaggagagcaagaaggaggatctggtgtttatcttctgggcccccgagtctgcgccccttaagagcaaaatgatttatgccagctccaaggacgccatcaagaagaagctgacagggatcaagcatgaattgcaagcaaactgctacgaggaggtcaaggaccgctgcaccctggcagagaagctggggggcagtgccgtcatctccctggagggcaagcctttgtgagccccttctggccccctgcctggagcatctggcagccccacacctgcccttgggggttgcaggctgcccccttcctgccagaccggaggggctggggggatcccagcagggggagggcaatcccttcaccccagttgccaaacagaccccccaccccctggattttccttctccctccatcccttgacggttctggccttcccaaactgcttttgatcttttgattcctcttgggctgaagcagaccaagttccccccaggcaccccagttgtgggggagcctgtattttttttaacaacatccccattccccacctggtcctcccccttcccatgctgccaacttctaaccgcaatagtgactctgtgcttgtctgtttagttctgtgtataaatggaatgttgtggagatgacccctccctgtgccggctggttcctctcccttttcccctggtcacggctactcatggaagcaggaccagtaagggaccttcgattaaaaaaaaaaaagacaataataaaaa

SEQ ID NO: 530 - DNA, 2732 bp, Homo sapiens
  ref <308>: DATABASE ACCESSION NUMBER: NCBI / NM_005381
  ref <309>: DATABASE ENTRY DATE: 2011-12-17
  ref <313>: RELEVANT RESIDUES IN SEQ ID NO: (1)..(2732)
ctttcgcctcagtctcgagctctcgctggccttcgggtgtacgtgctccgggatcttcagcacccgcggccgccatcgccgtcgcttggcttcttctggactcatctgcgccacttgtccgcttcacactccgccgccatcatggtgaagctcgcgaaggcaggtaaaaatcaaggtgaccccaagaaaatggctcctcctccaaaggaggtagaagaagatagtgaagatgaggaaatgtcagaagatgaagaagatgatagcagtggagaagaggtcgtcatacctcagaagaaaggcaagaaggctgctgcaacctcagcaaagaaggtggtcgtttccccaacaaaaaaggttgcagttgccacaccagccaagaaagcagctgtcactccaggcaaaaaggcagcagcaacacctgccaagaagacagttacaccagccaaagcagttaccacacctggcaagaagggagccacaccaggcaaagcattggtagcaactcctggtaagaagggtgctgccatcccagccaagggggcaaagaatggcaagaatgccaagaaggaagacagtgatgaagaggaggatgatgacagtgaggaggatgaggaggatgacgaggacgaggatgaggatgaagatgaaattgaaccagcagcgatgaaagcagcagctgctgcccctgcctcagaggatgaggacgatgaggatgacgaagatgatgaggatgacgatgacgatgaggaagatgactctgaagaagaagctatggagactacaccagccaaaggaaagaaagctgcaaaagttgttcctgtgaaagccaagaacgtggctgaggatgaagatgaagaagaggatgatgaggacgaggatgacgacgacgacgaagatgatgaagatgatgatgatgaagatgatgaggaggaggaagaagaggaggaggaagagcctgtcaaagaagcacctggaaaacgaaagaaggaaatggccaaacagaaagcagctcctgaagccaagaaacagaaagtggaaggcacagaaccgactacggctttcaatctctttgttggaaacctaaactttaacaaatctgctcctgaattaaaaactggtatcagcgatgtttttgctaaaaatgatcttgctgttgtggatgtcagaattggtatgactaggaaatttggttatgtggattttgaatctgctgaagacctggagaaagcgttggaactcactggtttgaaagtctttggcaatgaaattaaactagagaaaccaaaaggaaaagacagtaagaaagagcgagatgcgagaacacttttggctaaaaatctcccttacaaagtcactcaggatgaattgaaagaagtgtttgaagatgctgcggagatcagattagtcagcaaggatgggaaaagtaaagggattgcttatattgaatttaagacagaagctgatgcagagaaaacctttgaagaaaagcagggaacagagatcgatgggcgatctatttccctgtactatactggagagaaaggtcaaaatcaagactatagaggtggaaagaatagcacttggagtggtgaatcaaaaactctggttttaagcaacctctcctacagtgcaacagaagaaactcttcaggaagtatttgagaaagcaacttttatcaaagtaccccagaaccaaaatggcaaatctaaagggtatgcatttatagagtttgcttcattcgaagacgctaaagaagctttaaattcctgtaataaaagggaaattgagggcagagcaatcaggctggagttgcaaggacccaggggatcacctaatgccagaagccagccatccaaaactctgtttgtcaaaggcctgtctgaggataccactgaagagacattaaaggagtcatttgacggctccgttcgggcaaggatagttactgaccgggaaactgggtcctccaaagggtttggttttgtagacttcaacagtgaggaggatgccaaagctgccaaggaggccatggaagacggtgaaattgatggaaataaagttaccttggactgggccaaacctaagggtgaaggtggcttcgggggtcgtggtggaggcagaggcggctttggaggacgaggtggtggtagaggaggccgaggaggatttggtggcagaggccggggaggctttggagggcgaggaggcttccgaggaggcagaggaggaggaggtgaccacaagccacaaggaaagaagacgaagtttgaatagcttctgtccctctgctttcccttttccatttgaaagaaaggactctggggtttttactgttacctgatcaatgacagagccttctgaggacattccaagacagtatacagtcctgtggtctccttggaaatccgtctagttaacatttcaagggcaataccgtgttggttttgactggatattcatataaactttttaaagagttgagtgatagagctaacccttatctgtaagttttgaatttatattgtttcatcccatgtacaaaaccattttttcctacaaatagtttgggttttgttgttgtttcttttttttgttttgtttttgttttttttttttttgcgttcgtggggttgtaaaagaaaagaaagcagaatgttttatcatggtttttgcttcagcggctttaggacaaattaaaagtcaactctggtgccagaaaaaaaaaaaaaaaa

SEQ ID NO: 531-540 - skipped (10 entries)

SEQ ID NO: 541 - DNA, 1391 bp, Homo sapiens
  ref <308>: DATABASE ACCESSION NUMBER: NCBI / NM_005439
  ref <309>: DATABASE ENTRY DATE: 2011-12-26
  ref <313>: RELEVANT RESIDUES IN SEQ ID NO: (1)..(1391)
agccccggacgggagcgggcccacggggctgcaggtgtggagccccctggagctgagatcaggatgttccgcttcatgagggacgtggagcctgaggatcccatgttcctgatggatccctttgctattcaccgtcagcatatgagccgtatgttgtcaggtggctttggatatagccccttcctcagcatcacagatggcaacatgccagggaccaggcctgccagccgccggatgcagcaggctggagctgtctccccctttgggatgctgggaatgtcgggtggtttcatggacatgtttgggatgatgaatgacatgattggaaacatggaacacatgacagctggaggcaattgccagaccttctcatcttccactgtcatctcctactccaatacgggtgatggtgcccccaaggtctaccaagagacatcagagatgcgctcggcaccaggcgggatccgggagacacggaggactgttcgggattcagacagtggactggagcagatgtccattgggcatcacatccgggacagggctcacatcctccagcgctcccgaaaccatcgcacgggggaccaggaggagcggcaggactatatcaacctggatgagagtgaggccgcagcgtttgatgacgagtggcggcgggagacctcccgattccggcagcagcgtcccctggagtttcggcggcttgagtcctcaggggctgggggacgaagggcggaggggcctccccgcctggccatccagggacctgaggactccccttcccgacagtcccgccgctatgactggtgagggccccgggccctcagcctctcttgtacaggctgagaggctgagaaatcatcccctgaataactttttcctctcgattcccatccccaatttaatattaaattaacaggcaagccggcccccacctctccctgggggtctcagggagaacctttcacggcaccctttccctaccttttccttctttaatctcctggtttaccattgatgacttcgcctctgcatctactgacttgatttttcattctgccactccatcttcaaaccccctcacctttcccatcctactcctgccatgcattgaagggtcaatgcattttggggtgagctctgggtttaggggccccctccatccctcagctaccctggatctttgcccacctcttcctcagagcccccactgaggggccgtagccctatctagggctgtggaaggagcagactggttcctaactctctccctcctcctgcccacacacatcaaaagaatcttccctacacccttctctgcctttattttttgatttgtgcaacttgtaactaggtgtttatggaataaaggagaatggaaaaaagaccaa

SEQ ID NO: 542 - DNA, 7311 bp, Homo sapiens
  ref <308>: DATABASE ACCESSION NUMBER: NCBI / NM_006445
  ref <309>: DATABASE ENTRY DATE: 2011-11-05
  ref <313>: RELEVANT RESIDUES IN SEQ ID NO: (1)..(7311)
gaactcgggttgcgcacttcccggcgctgggaacgcggagcggacgcagtctggccgccattgcgctgcggggaaagcggcctcttgtgtgagggcctgtgggattctccggatatggccggagtgtttccttatcgagggccgggtaacccggtgcctggccctctagccccgctaccggactacatgtcggaggagaagctgcaggagaaagctcgaaaatggcagcaattgcaggccaagcgctatgcagaaaagcggaagtttgggtttgtggatgcccagaaggaagacatgcccccagaacatgtcaggaagatcattcgagaccatggagacatgaccaacaggaagttccgccatgacaaaagggtttacttgggtgccctaaagtacatgccccacgcagtcctcaaactcctggagaacatgcctatgccttgggagcagattcgggatgtgcctgtgctgtaccacatcactggagccatttccttcgtcaatgagattccctgggtcattgaacctgtctacatctcccagtgggggtcaatgtggattatgatgcgccgagaaaaaagagataggaggcatttcaagaggatgcgttttcccccttttgatgatgaggagccgcccttggactatgctgacaacatcctagatgttgagccactggaggccattcagctagagctggaccctgaggaggacgcccctgtgttggactggttctatgaccaccagccgttgagggacagcaggaagtatgtaaatggctccacttaccagcgctggcagttcacactacctatgatgtcgactctctaccgcctggctaatcagctcctgacagacttggtggatgacaactacttctacctgtttgatttgaaggccttctttacgtccaaggcactcaatatggccattcctggaggccccaaatttgaacctcttgttcgagacatcaacctacaggatgaagactggaatgaattcaatgatattaacaagattatcatccggcagcctatccgcactgagtacaagattgcttttccttacttgtacaacaatcttccacaccatgtccacctcacctggtaccatactcccaatgttgtattcatcaaaactgaggatcctgacttgccagctttctactttgaccctttgatcaacccaatctcccataggcactcagtcaagagccaggaaccattgccggatgatgatgaggaatttgagctcccggagtttgtggagcccttcctgaaggacacacccctctatacagacaatacagccaatggcattgccctgctctgggccccgcggcccttcaacctacgctctggtcgcacccgtcgggccctggacataccccttgtcaagaactggtatcgggagcattgtcctgccgggcagcctgtgaaagtgagggtctcctaccagaagctgcttaagtactatgtgctgaatgccctgaagcatcggccccctaaggctcaaaagaagaggtatttgttccgctccttcaaagccaccaaattctttcagtccacaaagctggactgggtggaggttgggctccaggtttgccgccagggctacaacatgctcaaccttctcattcaccgcaaaaacctcaactacctgcacctggactacaacttcaacctcaagcctgtgaaaacgctcaccaccaaggaaagaaagaaatctcgttttgggaatgctttccacctgtgtcgggaagttctgcgtttgactaagctggtggtggatagtcacgtgcagtatcggctgggcaatgtggatgccttccagctggcagatggattgcagtatatatttgcccatgttgggcagttgacgggcatgtatcgatacaaatacaagctgatgcgacagattcgcatgtgcaaggacctgaagcatctcatctattatcgtttcaacacgggccctgtagggaagggtcctggctgtggcttctgggctgccggttggcgagtctggctctttttcatgcgtggcattacccctttattagagcgatggcttggcaacctcctggcccggcagtttgaaggtcgacactcaaagggggtggcaaagacagtaacaaagcagcgagtggagtcacattttgaccttgagctgcgggcagctgtgatgcatgatattctggacatgatgcctgaggggatcaagcagaacaaggcccggacaatcctgcagcacctcagtgaagcctggcgctgctggaaagccaacattccctggaaggtccctgggctgccgacgcccatagagaatatgatccttcgatacgtgaaggccaaggctgactggtggaccaacactgcccactacaaccgagaacggatccgccgaggggccactgtggacaagactgtttgtaaaaagaatctgggccgcctcacccggctctatctgaaggcagaacaggagcggcagcacaactacctgaaggacgggccttacatcacagcggaggaagcagtggcagtatataccaccacagtgcattggttggaaagccgcaggttttcacccatcccattccccccactctcctataagcatgacaccaagttgctcatcttggcattggagcggctcaaggaagcttatagtgtgaagtctcggttgaaccagtctcagagggaggagctaggtctgatcgagcaggcctacgataacccccacgaggcgctgtcccgcatcaagcgtcacctcctcacacagagagccttcaaagaggtgggcattgagttcatggatctgtatagccacctcgttccagtatatgatgttgagcccctggagaagataactgatgcttacctggaccagtacctgtggtatgaagccgacaagcgccgcctgttcccaccctggattaagcctgcagacacagaaccacctccgctgcttgtttacaagtggtgtcaaggcatcaataacctgcaggacgtgtgggagacgagtgaaggcgagtgcaatgtcatgctggaatcccgctttgagaagatgtatgagaagatcgacttgactctgctcaacaggctgctgcgcctcatcgtggaccacaacatagccgactacatgacagccaagaacaacgtcgtcatcaactataaggacatgaaccatacgaattcatatgggatcatcagaggcctgcagtttgcctcattcatcgtgcagtattatggcctggtgatggatttgcttgtattgggattgcaccgggccagtgagatggctgggccccctcagatgccaaatgactttctcagtttccaggacatagccactgaggctgcccaccccatccgtctcttctgcagatacattgatcgcatccatatttttttcaggttcacagcagatgaggctcgggacctgattcaacgttacctgacagagcaccctgaccccaataatgaaaacatcgttggctataataacaagaagtgctggccccgagatgcccgcatgcgcctcatgaaacatgatgttaacttaggccgggcggtattctgggacatcaagaaccgcttgccacggtcagtgactacagttcagtgggagaacagcttcgtgtctgtgtacagtaaggacaaccccaacctgctgttcaacatgtgtggcttcgagtgccgcatcctgcctaagtgccgcaccagctatgaggagttcacccacaaggacggggtctggaacctgcagaatgaggttactaaggagcgcacagctcagtgtttcctgcgtgtggacgatgagtcaatgcagcgcttccacaaccgcgtgcgtcagattctcatggcctctgggtccaccaccttcaccaagattgtgaataagtggaatacagctctcattggccttatgacatactttcgggaggctgtggtgaacacccaagagctcttggacttactggtgaagtgtgagaacaaaatccagacacgtatcaagattggactcaactccaagatgccaagtcggttccccccggttgtgttctacacccctaaggagttgggtggactcggcatgctctcaatgggccatgtgctcatcccccaatccgacctcaggtggtccaaacagacagatgtaggtatcacacactttcgttcaggaatgagccatgaagaagaccagctcattcccaacttgtaccgctacatacagccatgggagagcgagttcattgattctcagcgggtctgggctgagtacgcactcaagaggcaagaggccattgctcagaacagacgcctgactttagaagacctagaagattcatgggatcgtggcattcctcgaatcaataccctcttccagaaggaccggcacacactggcttatgataagggctggcgtgtcagaactgactttaagcagtatcaggttttgaagcagaatccgttctggtggacacaccagcggcatgatgggaagctctggaacctgaacaactaccgtacagacatgatccaggccctgggcggtgtggaaggcattctggaacacacactctttaagggcacttacttccctacctgggaggggcttttctgggagaaggccagtggctttgaggaatctatgaagtggaagaagctaactaatgctcagcgatcaggactgaaccagattcccaatcgtagattcaccctctggtggtccccgaccattaatcgagccaatgtatatgtaggctttcaggtgcagctagacctgacgggtatcttcatgcacggcaagatccccacgctgaagatctctctcatccagatcttccgagctcacttgtggcagaagatccatgagagcattgttatggacttatgtcaggtgtttgaccaggaacttgatgcactggaaattgagacagtacaaaaggagacaatccatccccgaaagtcatataagatgaactcttcctgtgcagatatcctgctctttgcctcctataagtggaatgtctcccggccctcattgctggctgactccaaggatgtgatggacagcaccaccacccagaaatactggattgacatccagttgcgctggggggactatgattcccacgacattgagcgctacgcccgggccaagttcctggactacaccaccgacaacatgagtatctacccttcgcccacaggtgtactcatcgccattgacctggcctataacttgcacagtgcctatggaaactggttcccaggcagcaagcctctcatacaacaggccatggccaagatcatgaaggcaaaccctgccctgtatgtgttacgtgaacggatccgcaaggggctacagctctattcatctgaacccactgagccttatttgtcttctcagaactatggtgagctcttctccaaccagattatctggtttgtggatgacaccaacgtctacagagtgactattcacaagacctttgaagggaacttgacaaccaagcccatcaacggagccatcttcatcttcaacccacgcacagggcagctgttcctcaagataatccacacgtccgtgtgggcgggacagaagcgtttggggcagttggctaagtggaagacagctgaggaggtggccgccctgatccgatctctgcctgtggaggagcagcccaagcagatcattgtcaccaggaagggcatgctggacccactggaggtgcacttactggacttccccaatattgtcatcaaaggatcggagctccaactccctttccaggcgtgtctcaaggtggaaaaattcggggatctcatccttaaagccactgagccccagatggttctcttcaacctctatgacgactggctcaagactatttcatcttacacggccttctcccgtctcatcctgattctgcgtgccctacatgtgaacaacgatcgggcaaaagtgatcctgaagccagacaagactactattacagaaccacaccacatctggcccactctgactgacgaagaatggatcaaggtcgaggtgcagctcaaggatctgatcttggctgactacggcaagaaaaacaatgtgaacgtggcatcactgacacaatcagaaattcgagacatcatcctgggtatggagatctcggcaccgtcacagcagcggcagcagatcgctgagatcgagaagcagaccaaggaacaatcgcagctgacggcaacacagactcgcactgtcaacaagcatggcgatgagatcatcacctccaccaccagcaactatgagacccagactttctcatccaagactgagtggagggtcagggccatctctgctgccaacctgcacctaaggaccaatcacatctatgtttcatctgacgacatcaaggagactggctacacctacatccttcccaagaatgtgcttaagaagttcatctgcatatctgaccttcgggcccaaattgcaggatacctatatggggtgagcccaccagataacccccaggtgaaggagatccgctgcattgtgatggtgccgcagtggggcactcaccagaccgtgcacctgcctggccagctgccccagcatgagtacctcaaggagatggaacccttaggttggatccacactcagcccaatgagtccccgcagttatcaccccaggatgtcaccacccatgccaagatcatggctgacaacccatcttgggatggcgagaagaccattatcatcacatgcagcttcacgccaggctcctgtacactgacggcctacaagctgacccccagtggctacgaatggggccgccagaacacagacaagggcaacaaccccaagggctacctgccttcacactatgagagggtgcagatgctgctgtcggaccgtttccttggcttcttcatggtccctgcccagtcctcgtggaactacaacttcatgggtgttcggcatgaccccaacatgaaatatgagctacagctggcgaaccccaaagagttctaccacgaggtgcacaggccctctcacttcctcaactttgctctcctgcaggagggggaggtttactctgcggatcgggaggacctgtatgcctgaccgtttccctgcctcctgcttcagcctcccgaggccgaagcctcagcccctccagacaggccgctgacattcagcagtttggcctctttccctctgtctgtgcttgtgttgttgacctcctgatggcttgtcatcctgaataaaatataataataaattttgtataaataggaaaaaaaaaaaaaaaaa

SEQ ID NO: 543 - DNA, 746 bp, Homo sapiens
  ref <308>: DATABASE ACCESSION NUMBER: NCBI / NM_019059
  ref <309>: DATABASE ENTRY DATE: 2011-04-14
  ref <313>: RELEVANT RESIDUES IN SEQ ID NO: (1)..(746)
ccctgcgccacacggccgtcgccatggtgaagctgagcaaagaggccaagcagagactacagcagctcttcaaggggagccagtttgccattcgctggggctttatccctcttgtgatttacctgggatttaagaggggtgcagatcccggaatgcctgaaccaactgttttgagcctactttggggataaaggattatttggtcttctggatttggaggcaatcagcggacagcatggaagatgtgtgctctggctcggataagagatgggacatcattcagtcactagttggatggcacaaggctcttcacagacgcatctgtagcagagtggatcttgtactaacttatgatagaatgtatcagaataaatgtttttaacagtgttatgcttgagtcttttttgaattgaacatgctaggattatcaggtaaaaattaagccttttggtactttctcaaaacagggaatttatgtgtatacctaggtgctatttaagcctgtaaatcccagcactttgggaggccagggcgggtggatcacgatataaaaaaatttttccaagttattcctgcccattgacctaacatatggattacagtttccctttgcagtgaattaataactccttctaggatattccgaggtagtaagaatacagatagttctgtttgtgacaaaccaagctgttacttcctcctctgcattaaagttctgactgcaagaaaaaaaaaaaaaaaaaaaa

SEQ ID NO: 544 - DNA, 5983 bp, Homo sapiens
  ref <308>: DATABASE ACCESSION NUMBER: NCBI / NM_006039
  ref <309>: DATABASE ENTRY DATE: 2011-12-17
  ref <313>: RELEVANT RESIDUES IN SEQ ID NO: (1)..(5983)
gaaggcgaggcggggagagactgggaaacagagcagcaagagaaagggcgcacgctggggtcctcctggacccggcgtgtcctcctctccgccacccctttctctccctcccgacgctctagccccagacccgcgcctcctccccttcccctcccacgctgcccacttcccttcccctctacccctcgaaccctcctccccggttctgcgctcctccctccgccctccctccgcccgggctgcctcctccctcctcctccccgggaggcatcacttcgtcccgacccggaggaggacgcgagccccttgcgggcggtcatcacagcccagcctcggggctgccacagcgcgttgcgcctgtgcgccctcggtccccgcgtccactgagcgccgcgctcggggatggggcccggccggccggcccccgcgccctggcctcgtcacctgctgcgctgcgtcctgctcctcgggtgcctgcacctcggccgtcccggcgcccctggggacgccgccctcccggaacccaacgtcttcctcatcttcagccatggactgcagggctgcctggaggcccagggcgggcaggtcagagtcaccccggcttgcaataccagcctccctgcccagcgctggaagtgggtctcccgaaaccggctattcaacctgggtaccatgcagtgcctgggcacaggctggccaggcaccaacaccacggcctccctgggcatgtatgagtgtgaccgggaagcactgaatcttcgctggcattgtcgtacactgggtgaccagctgtccttgctcctgggggcccgcaccagcaacatatccaagcctggcacccttgagcgtggtgaccagacccgcagtggccagtggcgcatctacggcagcgaggaggacctatgtgctctgccctaccacgaggtctacaccatccagggaaactcccacggaaagccgtgcaccatccccttcaaatatgacaaccagtggttccacggctgcaccagcacgggccgcgaggatggtcacctgtggtgtgccaccacccaggactacggcaaagacgagcgctggggcttctgccccatcaagagtaacgactgcgagaccttctgggacaaggaccagctgactgacagctgctaccagtttaacttccagtccacgctgtcgtggagggaggcctgggccagctgcgagcagcagggtgcggatctgctgagcatcacggagatccacgagcagacctacatcaacggcctcctcactgggtacagctccaccctgtggatcggcttgaatgacttggacacgagcggaggctggcagtggtcggacaactcgcccctcaagtacctcaactgggagagtgaccagccggacaaccccagtgaggagaactgtggagtgatccgcactgagtcctcgggcggctggcagaaccgtgactgcagcatcgcgctgccctatgtgtgcaagaagaagcccaacgccacggccgagcccacccctccagacaggtgggccaatgtgaaggtggagtgcgagccgagctggcagcccttccagggccactgctaccgcctgcaggccgagaagcgcagctggcaggagtccaagaaggcatgtctacggggcggtggcgacctggtcagcatccacagcatggcggagctggaattcatcaccaagcagatcaagcaagaggtggaggagctgtggatcggcctcaacgatttgaaactgcagatgaattttgagtggtctgacgggagccttgtgagcttcacccactggcacccctttgagcccaacaacttccgggacagtctggaggactgtgtcaccatctggggcccggaaggccgctggaacgacagtccctgtaaccagtccttgccatccatctgcaagaaggcaggccagctgagccagggggccgccgaggaggaccatggctgccggaagggttggacgtggcacagcccatcctgctactggctgggagaagaccaagtgacctacagtgaggcccggcgcctgtgcactgaccatggctctcagctggtcaccatcaccaacaggttcgagcaggccttcgtcagcagcctcatctacaactgggagggcgagtacttctggacggccctgcaggacctcaacagcaccggctccttcttctggctcagtggggatgaagtcatgtacacccactggaaccgggaccagcccgggtacagccgtgggggctgcgtggcgctggccactggcagcgccatggggctgtgggaggtgaagaactgtacctcgttccgggcccgctacatctgccggcagagcctgggcactccagtgacgccggagctgccggggccagatcccacgcccagcctcactggctcctgtccccagggctgggcctcggacaccaaactccggtattgctataaggtgttcagctcagagcggctgcaggacaagaagagctgggtccaggcccagggggcctgccaggagctgggggcccagctgctgagcctggccagctacgaggaggagcactttgtggccaacatgctcaacaagatcttcggtgaatcagaacccgagatccacgagcagcactggttctggatcggcctgaaccgtcgggatcccagagggggtcagagttggcgctggagcgacggcgtagggttctcttaccacaatttcgaccggagccggcacgacgacgacgacatccgaggctgtgcggtgctggacctggcctccctgcagtgggtggccatgcagtgcgacacacagctggactggatctgcaagatccccagaggtacggacgtgcgggagcccgacgacagccctcaaggccgacgggaatggctgcgcttccaggaggccgagtacaagttctttgagcaccactccacgtgggcgcaggcgcagcgcatctgcacgtggttccaggccgagctgacctcggtgcacagccaggcggagctagacttcctgagccacaacttgcagaagttctcccgggcccaggagcagcactggtggatcggcctgcacacctctgagagcgatgggcgcttcagatggacagatggttccattataaacttcatctcctgggcaccaggcaaacctcggcctgtcggcaaggacaagaagtgcgtgtacatgacagccagccgagaggactggggggaccagaggtgcctgacagccttgccctacatctgcaagcgcagcaacgtcaccaaagaaacgcagcccccagacctgccaactacagccctggggggctgcccctctgactggatccagttcctcaacaagtgttttcaggtccagggccaggaaccccagagccgggtgaagtggtcagaggcacagttctcctgtgaacagcaagaggcccagctggtcaccatcacaaaccccttagagcaagcattcatcacagccagcctgcccaatgtgacctttgacctttggattggcctccatgcctcgcagagggacttccagtgggtggagcaggagcctttgatgtatgccaactgggcacctggggagccctctggccctagccctgctcccagtggcaacaaaccgaccagctgtgcagtggtcctgcacagcccctcagcccacttcactggccgctgggacgatcggagctgcacggaggagacccatggcttcatctgccagaagggcacggacccctccctgagcccgtccccagcagcgctgccccccgccccgggcactgagctctcctacctcaacggcaccttccggctgcttcagaagccgctgcgctggcacgatgccctcctgctgtgtgagagccgcaatgccagcctggcctacgtgcccgacccctacacccaggccttcctcacgcaggctgcccgagggctgcgcacgccgctctggattgggctggctggcgaggagggctctcggcggtactcctgggtctcagaggagccgctgaactacgtgggctggcaggacggggagccgcagcagccggggggctgtacctacgtagatgtggacggggcctggcgcaccaccagctgtgacaccaagctgcagggggctgtgtgtggggttagcagtgggccccctcctccccgaagaataagctaccatggcagctgtccccagggactggcagactccgcgtggattcccttccgggagcactgctattctttccacatggagctgctgctgggccacaaggaggcgcgacagcgctgccagagagcgggtggggccgtcctgtctatcctggatgagatggagaatgtgtttgtctgggagcacctgcagagctatgagggccagagtcggggcgcctggctgggcatgaacttcaaccccaaaggaggcactctggtctggcaggacaacacagctgtgaactactccaactgggggcccccgggcttgggccccagcatgctgagccacaacagctgctactggattcagagcaacagcgggctatggcgccccggcgcttgcaccaacatcaccatgggtgtcgtctgcaagcttcctcgtgctgagcagagcagcttctccccatcagcgcttccagagaacccagcggccctggtggtggtgctgatggcggtgctgctgctcctggccttgctgaccgcagccctcatcctttaccggaggcgccagagcatcgagcgcggggcctttgagggtgcccgctacagccgcagcagctccagccccaccgaggccactgagaagaacatcctggtgtcagacatggaaatgaatgagcaacaagaatagagccaggcgcgtgggcagggccagggcgggaggagctggggagctggggccctgggtcagtctggccccccaccagctgcctgtccagttggcctatggaagggtgcccttgggagtcgctgttgggagccggagctgggcagagcctgggctggtggggtgccaccctcccacaagggctgggctgagacccagctgagtgcagcgtggcgtttccctttctgggggggcctgaggtcttgtcacctggtcctgtgcccccacaggaaccagaggtaggatgggagggggaacgagagcctctttctccccagagcccccggcccaggcctgttgatccgcgccccaggacccccttctttgcagagcccgaggagcctcccctgtcccctcgggcagatctgttgtgtctctcttcccacctggcagcctcagctctgtgcccctcaccctgctccctctcgccccttctctcccaccccttccttctgagccgggccctggggattggggagccctcttgttcctgatgagggtcagctgagggggctgagcatccatcactcctgtgcctgctggggtggctgtggggcgtggcaggaggggcctaggtgggttgggcctgagaaccagggcacgggtgtggtgtctgctgggctggagataagactggggagagacaccccaacctcccagggtgggagctgggccgggctgggatgtcatctcctgccgggcgggggagggctctgcccctggaagagtcccctgtggggaccaaaataagttccctaacatctccagctcctggctctggtttggagcaaggggaagggttgccagagtcctgggggccccagaggagcaggagtctgggagggcccagagttcaccctctagtggatccaggaggagcagcacccgagccctggagtggcccagtacccttccaagaggccacagtcccagccaggacaaagtatgcggcccatcctggtgcgacagcgtgggacaatgtgaacatggactcgaagacatggccctttctctgtagttgattttttaaatgtgccattattgtttttaaaaaaaaaggaaaaaagaaaagcaaacaaataaaacacctttaagaggcttgaaa

SEQ ID NO: 545 - DNA, 1597 bp, Homo sapiens
  ref <308>: DATABASE ACCESSION NUMBER: NCBI / NM_006066
  ref <309>: DATABASE ENTRY DATE: 2011-12-04
  ref <313>: RELEVANT RESIDUES IN SEQ ID NO: (1)..(1597)
aaaaggcgaggctggccccgccccttgcaccgcccacgtggccagcgccacctgcctcattgtgcccaggagttctccaaacccgcgctgcggagtgagtgaccaagttccggccagttcgacctcgaggatccagaggtggagacggtactacctcccagctctgttttccatccccttcaggtccttcctcgggaggcggcgaaggcggtccaccctgcgcgtgatcctttatgcccggcccctgcccctccctccgggtggaacttccccctcaccgccagacttaagctgaggatcgttggatctctggcggggtgcagaactgagcccaggccacagtaccctattcacgctctgtgcttgtgccaaggtttcaagtgatcctcccgcctcagcctgcccaggtgctgagattacatgtatgagccactgcacctggaaaggagccagaaatgtgaagtgctagctgaaggatgagcagcagctagccaggcaaagggggcaatggcggcttcctgtgttctactgcacactgggcagaagatgcctctgattggtctgggtacctggaagagtgagcctggtcaggtaaaagcagctgttaagtatgcccttagcgtaggctaccgccacattgattgtgctgctatctacggcaatgagcctgagattggggaggccctgaaggaggacgtgggaccaggcaaggcggtgcctcgggaggagctgtttgtgacatccaagctgtggaacaccaagcaccaccccgaggatgtggagcctgccctccggaagactctggctgacctccagctggagtatctggacctgtacctgatgcactggccttatgcctttgagcggggagacaaccccttccccaagaatgctgatgggactatatgctacgactccacccactacaaggagacttggaaggctctggaggcactggtggctaaggggctggtgcaggcgctgggcctgtccaacttcaacagtcggcagattgatgacatactcagtgtggcctccgtgcgtccagctgtcttgcaggtggaatgccacccatacttggctcaaaatgagctaattgcccactgccaagcacgtggcctggaggtaactgcttatagccctttgggctcctctgatcgtgcatggcgtgatcctgatgagcctgtcctgctggaggaaccagtagtcctggcattggctgaaaagtatggccgatctccagctcagatcttgctcaggtggcaggtccagcggaaagtgatctgcatccccaaaagtatcactccttctcgaatccttcagaacatcaaggtgtttgacttcacctttagcccagaagagatgaagcagctaaatgccctgaacaaaaattggagatatattgtgcctatgcttacggtggatgggaagagagtcccaagggatgcagggcatcctctgtacccctttaatgacccgtactgagaccacagcttcttggcctcccttccagctctgcagctaatgaggtcctgccacaacggaaagagggagttaataaagccattggagcatccataaaaaaaaaaaaaaaaaa

SEQ ID NO: 546 - DNA, 11062 bp, Homo sapiens
  ref <308>: DATABASE ACCESSION NUMBER: NCBI / NM_013318
  ref <309>: DATABASE ENTRY DATE: 2011-12-18
  ref <313>: RELEVANT RESIDUES IN SEQ ID NO: (1)..(11062)
gcagatcgggagcggtgccgagaaaaatttccttactagatgacatttcatcgcaatgtccgatcgtttggggcaaattaccaagggcaaggatgggaaaagcaagtactcgactctcagcctgtttgataagtataaaggaaaatcagtagacgcgattagatcctcagttattcctagacatggcttacagagtcttgggaaagttgctgcagcccggcgcatgccaccgcctgcaaacctgccaagcttgaagtctgaaaacaaaggaaacgaccccaacatcgtgatagtacccaaggacgggacgggatgggcaaacaagcaggatcagcaagacccaaagagttccagtgcgacggcctctcagccgccggagtcgctgccgcagccgggtttgcagaaatctgtctccaatttgcagaaaccgacacagtcaatcagtcaggagaatacaaattcagtgccaggtggaccaaagtcatgggcacagctgaatggaaagccagtaggacacgaaggtggtttaaggggctcaagccgactgttatccttctctcccgaggaatttccgacgctgaaagcagctggagggcaggacaaggctggcaaagaaaagggcgtcttagatctgtcgtatgggccaggaccaagcctccgccctcagaatgtgacaagctggagggagggcggtgggcgacacataatttctgccacgtctctgagcacctccccaactgagctgggcagcaggaactcgagtacgggagatggagccccctcctcggcatgtaccagcgattctaaggacccctctctccgcccggctcagcctgtccgaaaaggggcttcacagttcatgggaaatgtataccacccacctacataccatgacatgcttcctgcttttatgtgttcgccgaagtcatcagaaaaccagggtacagtggaacgaggctcttttccccttcctcagctccgccttgaacctcgagttccttttagacagttccagatgaatgaccaagacggaaaagaaaacaggctgggattgtctcgcccactccgcccactaaggcagctggtggagcgggcaccacggcccaccattatcaatgcggaaaacctgaagggccttgacgatctggacgccgatgccgatgatggctgggcaggcctccatgaagaagtggactattctgagaaactgaagttcagtgatgatgaagaggaggaagaagttgtgaaggacggcaggccaaagtggaacagttgggaccctaggaggcagcggcagttgtcaatgagctctgcagacagtgcggacgctaagcggactcgagaggaagggaaggactgggctgaagcagtgggtgcgtcccgtgtggtccgaaaggcgccagaccctcagccaccgcccaggaagcttcatggctgggcaccaggccctgactaccagaagtcatcaatgggcagcatgttccggcaacagtccatcgaggacaaggaggacaagcccccaccaaggcagaagttcattcagtcagagatgtccgaggcggtggagcgagcccgaaagcgccgggaagaagaggagcgccgagcccgggaggagaggctggccgcctgtgctgccaaactcaagcagctggaccagaagtgtaagcaggcacgaaaggcaggtgaggcccggaagcaggcagagaaggaagtgccctggtctccaagtgctgagaaggcatctccccaggaaaacggccctgctgtccacaaaggctccccagaattccctgcccaagagacccccaccacattcccagaagaggcacccacagtgtccccagcagtggcacagagcaacagcagtgaggaagaggccagagaggctgggtcccctgcacaggagttcaagtatcagaagtcccttcctccccgattccagcgccagcagcagcaacaacagcaggagcagctgtacaagatgcagcactggcagccggtgtaccccccgccgtcccacccccagcgcaccttttacccacaccacccccagatgttgggcttcgatcccaggtggatgatgatgccttcctacatggacccacgtatcacgcccactcggaccccggtggacttctacccctccgccctgcatccctcaggactgatgaagcccatgatgccccaggagtccctcaatgggacaggctgtcgctctgaggatcagaactgtgtgcccccactccaagaaagaaaagtgacccccatcgactcaccccctgtgtggagcccagagggctacatggcactgcagagcaagggctacccgctcccgcacccgaagtcgagtgacaccttggctatggacatgcgtgtcaggaatgaaagctctttctctgcctcactcggaagggcagggggcgtaagtgctcagcgcgatctctttgaggagagaggggaggagtacttgagtgcttttgacaagaaggcccaagcagactttgacagctgtatctcttctcaaagaataggccaggagcttttgtttccaccccaagaaaatgttcaggatgcaggtgctcctgggggtcacacccaaaacctcaggtgttccccattggagcctgactttgtcccagatgagaaaaagccagagtgtggcagttgggatgttagccaccagccagagaccgctgacacagcccatggtgttgagcgggagacaccccgggaggggacggcctttaacatctcctcctgggacaagaacgggagccccaacaaacagccatcctcggagcctgaatggactcccgagccccggagctccagcagccagcacccggagcagacgggcaggacccggaggtcgggacccatcaagaaaccagtcctgaaagccctcaaggtggaagacaaggagaaggagcttgagaagattaagcaggagctaggggaggagagtacccggctggccaaggagaaggagcagagccccacggcagaaaaggatgaggacgaagagaacgatgcctctctggccaactcctccaccaccactttggaggacaaaggccctggccatgccacttttggccgcgaggccaccaaatttgaagaggaggagaaacctgacaaggcctgggaagccagacccccacgagagtccagcgatgttccccccatgaagagaaataactggatctttattgatgaggagcaagcctttggggtcagaggacaggcccggggccggggccgtggtttcagagagttcacttttcgtggtcggcctgctggcggaaatgggagcggcctctgtggtgggggggtcctgggggcccgcagcatctactgcagcagtcagcgcagcggccgtggccggggcctgcgagagtttgcgcggccagaggactgccccagagccaagccccgacggagagttgccagtgagacccatagcgagggctcagagtatgaagaacttcccaagcgccgccggcagaggggctccgagaacgggaatgaaggctcgctcctggagagggaggagagcaccttgaagaagggcgactgcagagattcttggcggtccaacaaggggtgctctgaggaccacagcggtctagatgccaagagccgaggccctcgggcctttgggcgagccctccctccccggctgagcaattgcgggtatggacggagaaccttcgtctccaaagagtcaccccactggcagagcaaaagtccaggcagctcttggcaggaatatggcccttccgacacatgcggatcccggcgacctacagacagagactatgtcccagattcctacagacaccctgacgcatttggtggccggggctttgaggacagccgcgcggaggacaagagatccttcttccaagatgaacacgtggcagattctgaaaatgcagagaaccggcccttcaggagaaggcgccccccacgccaagataagccccctcgattccggcgcctccggcaagagcgggagtccctgggcctgtggggacccgaggaggagccccacctgctggcaggtcagtggccaggcaggcccaaactgtgttctggggacaagagtggcactgtgggccgcaggtcccctgagctctcctaccagaactcctccgatcacgccaatgaggagtgggagacggcctccgaaagcagcgacttcagcgagcggcgggagcggcgggaaggccctgggtccgagcccgactcccaggtggatggtggcctgtcgggggctagtttgggtgagaagaaggagctggccaagaggagcttctccagtcagagacccgtggttgacagacagagccgaaagctggagccgggagggtttggggagaagcccgttaggccaggtggtggtgacacctcccctcgctatgagagccaacagaatgggacgcctttgaaagtgaaaagatccccagacgaggccttgcctggaggtcttagtggctgcagcagtgggagtggccactccccctatgccctggagcgggcagcccatgccagtgctgaccttcccgaagcctccagtaaaaaggcagagaaggaggccaagttggctgctccgagggcaggtgaacagggagaggccatgaaacagtttgacctgaactatggaagtgccatcattgaaaattgcgggtccagccccggggaggagagtgaggtgggttctatggtgggcgaaggcttcatcgaagtcctgaccaagaagcagcgccgcctgctggaggaagagagaagaaagaaggagcaggccgtgcaggtgcctgtcaaaggtcgaggcctttcctcccgtattcctcctcgatttgcaaaaaagcagaacaacttatgtctggagcaaggtgacgtgaccgtgcctggcagcagcctgggcactgagatctgggagagcagcagccaggctctccctgtgcaggccccagccaacgactcctggaggaaagctgtcactgccttcagcagcaccgagactggctctgcggagcagggttttaagagcagccagggagatagtggcgttgacttgagtgccgagtctcgggagtcgtctgcgacctcctcgcagcgcagctccccatatgggactctgaagccagaggagatgagcgggcccggcctggcggaacccaaggccgacagccacaaggagcaggctccaaagccatctgagcagaaggattcagaacaaggctctggacagagcaaggagcacagaccaggacccatcggcaacgagcgttctctgaaaaacagaaagggctcggagggggccgagcggctgcaaggggctgtcgtcccgcctgttaacggggtggagattcacgtggactccgtgctgcctgtgccacccattgaatttggagtcagtccaaaagactccgatttcagcttgccacctggttctgcctctggtcctactgggagtccagttgttaaacttcaggatgccttggccagtaatgcagggttaacacagagtatccccatcctgcggcgggaccatcacatccagagggccatcggtctctccccaatgtccttccccaccgccgaccttactctgaagatggagtctgcgcgcaaggcttgggaaaactcccccagtttgccggagcagagctctccaggcggcgctggctcaggcatccagcctccatcctctgtgggtgcctccagcggggtcaactacagctccttcggtggagtgtccatgccacccatgcctgtggcctctgtagcaccttctgcttctatgccaggcagccacctcccgcccctgtacctggatggccatgtgtttgcaagtcagccccggctggttcctcaaacgatacctcagcagcagagttaccaacaggccgccgctgcccagcagatcccgatctcccttcacacatctctgcaggcacaagctcagcttggactgaggggtgggcttcctgtgtcccagtcccaggagatcttcagctccttgcagcccttcagatctcaggtgtacatgcaccccagcctgtcaccgcccagcaccatgatcctctctgggggcacagccttgaagcctccatactcggcgttcccaggcatgcagcccttggagatggtgaagccgcagtctggctcaccctaccagcccatgagcgggaaccaagccctggtctacgagggccagctcagccaggctgctggcctgggtgcctcccagatgttggactcccagctcccacagctgaccatgccactgcctcggtacggctccgggcagcagccactgatcctgccccagtctattcagctgccacctgggcagagcctctccgttggggccccccgaaggattcctccgcccgggtcccagccgccagtcctgaacaccagcagagagccctctcagatggagatgaaaggcttccactttgccgacagtaaacagaatgtcccttcaggaggccccgtgccatcgccacagacctacaggcctagctctgctagccccagtgggaagccctctggatcagcagttaacatgggctctgtgcagggacactacgtgcaacaggcaaaacaacgagtggatgagaaacccagcctgggagccgtgaagctgcaggaggccccctcggctgcctcccagatgaagcgaaccggagcgatcaagcctcgggctgtcaaagtggaggagagtaaggcctgacagtgcctggctgccacctcgcctctccctactgaggacggtgccgccatgcggcctcgacacagccgacactcgggagcctcaccagatccaccgtccaaatgcgtggcccagactgagagacctccctcctctccactcccgaaagctccgttgtcaaccagcttgcacccgtggatatatggcattgacccgcttgctttgatacgaaacaaaaaagcagacgactccttcatcccatctgctcctaccgtgactgtggagtgacgcctcctgtgcagtgcagatttgccctccctgcctcctccctgtcctgccgcgcagccagggcgccttctcagcagtgcttccggcccagccgcccatccctaggcacagtgatttggcagcagggtcattttactttgaggctttttgttttaaaatgtagccaaggtttttacaaaggggaaaggaaaagaaaacaaaaacgcaagctccatgtgtatagctgaacttttatatgtttcttgccagcccctccgctcccttccatctctagcctctgtcctgtttagtttgatacgtcactgcagtaccttaagaggtgactcttaagaatgcatcccctcctgattcctcagctggttcacccttgaggttatttgcaaaaagaaaaggaggttcttgagggcaccgattgcgagcattctggtgcctggctccccgcctgggaagcgatggggtgctcagagcagcaggcaggttgggggagggggggggtcatagttgggttccagctcctggcttgatgagcccagggcgcttacaggcagcccatgaagttgatgacagttttagcatgagaatcacacagggtccctgtcctgggctcctctaaagccagtggatgtgctgggcaccagagacaaatcatggagatggctgctggtggctcccaggttggcccagatggggtgagctgacataccacaggcccatcccaggccccgtgggctctgcttctggggctccataccctgccctgcaggggtgctgtgtttttcacacatttctttccctgaagccttctgtaacctgtcattttccttccttcctcttccggagcctgctgctttctctggacctgtctccacctcccacacagctcatcgtgaacaccacttggtgatggagggagtggacccgtgtgtggtccccaagtgaggccactgggagtttgtccttttcctcctttgcttcactcccagcagcagacccaggttgtcaggacaggagggcctgagctaagcagtaggcatcagtctcgtttgtcttcagacggcgggggcaggtccagggtgaggctgggtggagggctgaccaaggtccaaagggcctgcgcagcctccgggagggcagcttctccagccagaggcttgtgtgagccatcgtgtgctgggcttgtttttaagtaagaaacaaggaaatcactccagattctgtcattccaaggaaagggaaggggacagttcaggtttctcagctgttcttaggggtcactgagcgtctacctcctcctccagaggaggctggctcagaacacctagaggagggggccggggatgcaccccccaccagaggctgccttcagcgtctcacgggtgcaggacagcgctcaggcttgggctctaagctctgtgtctagtgtagaacatggggaaggagcatcttaggaactgctgaagtaacttcttactgctctcacaattctaaggaagcgggagaacggcctcctaccaacagcgcccaccccagagctgcctgggaaagggcagttttactgaaaggtgctttactgttcacctgcatctttcagcagctcccctcctgccctcacctggtcttttccctctttatcccaagcctttatgcttgagtcccttccccaggggctgcccacccgacagttccaggcattccctacctgagcttcttgtctgcttttccttctcccactgcaagcggctgcttgtggggcctgggatgagccctctctgtccccaccggccctccttgccaagccattcctgggtgagttcaggcctgcgggagccacacattcatctccacctggacacttgagccgcatggccagacccctcccacctgatgcggtggtgcgtgtgatttgtcaaaagaaagccttctggatgctgttaagatgtacccttcaggtgaacctggtatcagacccacagtacttgctgtttgagaaaaaataaaaacaaaaaggtcacctgttctccagcccttttctcttacctggtatttccttcctttctcctcccccaccccaaataaaaaaacaaaaaacactagaatttatttatatgtattgatgttgtaggtctaggtgaaaaaaaaagaagtaaatgtttcactgctctatttatatataatgtctgaattaattctgtgcaggaaaggccaggaaattgcatgtgaagttcggtgcagtcaccacctgtgtgtgacctgagctgcagtctcttcgctgagatgcaggttttaaatgagacttggggggctgagggcaggcctcaggcctcccagcgccccaacccctccttggtctaatgaaatgcagttcttagtgcagagatgttttaaggtgcaatatatctcttcctttcccgtggttttagagccaagctcaaggtagtaggacgtagggtcttattttgttttcaaacccccatcctcagagcgcagatacatgcagaggcttctgccaggataccacggggccttagtgggaacaggtggagaccagcacttccctttcctgctgctgaggtagggattggggggtcagaacccactcacttttgcctgttaaagttgccctcctgacgctggcagctctgccttggtcactggggatgcggctcgttgctcagccaccagtggccttgcggtattgtccaccatccactagagtgggatgaagtccagagtgtgggtatacatctcagatgcccatctacccactggggacttcaatgccagctgcatttggtttggttttcttaactgttggcttctccccacagcgttttttgtttttttttaaacattcatattgttttcaaacttggaattcatagacactctggctctaggttccttaagggggaaaacaaaagatgactttatttcacattcaagaaaatcagttcagttccaaagctgtggtccttccagccacttctagggacactggggaaccttgttaaacgttgacatcagtgctctccagccgtgctgtcaccctcctatcttctggatctgccttcgcgatggtcagtgacagcttctggaagctgagcacacacaggtgcacagccatgctgtggtctggcctgctacggcagcatggcagctctggtggagccttctcccttgccatttggttcccctgtgccaagtagctgcaggctgcccctcaaatcttcatttgtcccttttcacttcctgcagaacaagcctgggttagagggtctgctggaaatggcctttgaagaccaaggataccaggatgtgtgcactctgtcgtgttctgtgatgaatgggaaacgtaggcttccagaaagccagctctcttctgaaatgtgacggacctaagcaggaagtcatccaggacaggagtggctcagtgttggggatggacgctgtcgcccagccatgctccaccagggccaccaatgtgtagttggctggtggtcttcgggcatgtgagacctgctcttcactgtttccaccccacttggtggcctccaggatggtagtggcaccctcagagccccatcttcagcatgttctgaagcctcagagtggaaattcctgctaaggctctgtgtggacgcctttctcccgtgatctaaaggggacactgtactcaagcttttgacctcatgccttgtgtagtaaaaaaggatttgggggttttgtttggttcctgagagggttgtgttttgtttttgtttccttttgtttatgttttggcctttcctctttgtctttccatgtagaccagatatttgaaagggcagacgatggctagaggtgtaatgtgcagcttgtttatacggtattttgggaaacttaccttggatgggaaatcgaatcgtggattcaccaggccggtgctggcacactcaccctcgccctttccctccggttcagtacctattgtttctcctttcaaatatgtgattgtactagctctttccatatgaaagaattctccttatttaaataaaaaaagtttaaaaa

SEQ ID NO: 547 - DNA, 1125 bp, Homo sapiens
  ref <308>: DATABASE ACCESSION NUMBER: NCBI / NM_006098
  ref <309>: DATABASE ENTRY DATE: 2011-12-25
  ref <313>: RELEVANT RESIDUES IN SEQ ID NO: (1)..(1125)
ctctctttcactgcaaggcggcggcaggagaggttgtggtgctagtttctctaagccatccagtgccatcctcgtcgctgcagcgacacacgctctcgccgccgccatgactgagcagatgacccttcgtggcaccctcaagggccacaacggctgggtaacccagatcgctactaccccgcagttcccggacatgatcctctccgcctctcgagataagaccatcatcatgtggaaactgaccagggatgagaccaactatggaattccacagcgtgctctgcggggtcactcccactttgttagtgatgtggttatctcctcagatggccagtttgccctctcaggctcctgggatggaaccctgcgcctctgggatctcacaacgggcaccaccacgaggcgatttgtgggccataccaaggatgtgctgagtgtggccttctcctctgacaaccggcagattgtctctggatctcgagataaaaccatcaagctatggaataccctgggtgtgtgcaaatacactgtccaggatgagagccactcagagtgggtgtcttgtgtccgcttctcgcccaacagcagcaaccctatcatcgtctcctgtggctgggacaagctggtcaaggtatggaacctggctaactgcaagctgaagaccaaccacattggccacacaggctatctgaacacggtgactgtctctccagatggatccctctgtgcttctggaggcaaggatggccaggccatgttatgggatctcaacgaaggcaaacacctttacacgctagatggtggggacatcatcaacgccctgtgcttcagccctaaccgctactggctgtgtgctgccacaggccccagcatcaagatctgggatttagagggaaagatcattgtagatgaactgaagcaagaagttatcagtaccagcagcaaggcagaaccaccccagtgcacctccctggcctggtctgctgatggccagactctgtttgctggctacacggacaacctggtgcgagtgtggcaggtgaccattggcacacgctagaagtttatggcagagctttacaaataaaaaaaaaactggcttttctgacaaaaaaaaaaaaaaaa

SEQ ID NO: 548 - DNA, 4198 bp, Homo sapiens
  ref <308>: DATABASE ACCESSION NUMBER: NCBI / NM_007359
  ref <309>: DATABASE ENTRY DATE: 2011-11-21
  ref <313>: RELEVANT RESIDUES IN SEQ ID NO: (1)..(4198)
aatccgggtcggccgcaaacgtgccgcaggcctaggccccgcccagtgccccgcccctcccccaacacacacacacacacacacacacacacacaccccaacacacacacacacaccccaacacacacacacacacacacacacacacacacacacacacacacacacacacacacagcgggatggccgagcgccgcacgcgtagcacgccgggactagctatccagcctcccagcagcctctgcgacgggcgcggtgcgtaagtacctcgccggtggtggccgttctccgtaagatggcggaccggcggcggcagcgcgcttcgcaagacaccgaggacgaggaatctggtgcttcgggctccgacagcggcggctccccgttgcggggaggcgggagctgcagcggtagcgccggaggcggcggcagcggctctctgccttcacagcgcggaggccgaaccggggcccttcatctgcggcgggtggagagcgggggcgccaagagtgctgaggagtcggagtgtgagagtgaagatggcattgaaggtgatgctgttctctcggattatgaaagtgcagaagactcggaaggtgaagaaggtgaatacagtgaagaggaaaactccaaagtggagctgaaatcagaagctaatgatgctgttaattcttcaacaaaagaagagaagggagaagaaaagcctgacaccaaaagcactgtgactggagagaggcaaagtggggacggacaggagagcacagagcctgtggagaacaaagtgggtaaaaagggccctaagcatttggatgatgatgaagatcggaagaatccagcatacatacctcggaaagggctcttctttgagcatgatcttcgagggcaaactcaggaggaggaagtcagacccaaggggcgtcagcgaaagctatggaaggatgagggtcgctgggagcatgacaagttccgggaagatgagcaggccccaaagtcccgacaggagctcattgctctttatggttatgacattcgctcagctcataatcctgatgacatcaaacctcgaagaatccggaaaccccgatatgggagtcctccacaaagagatccaaactggaacggtgagcggctaaacaagtctcatcgccaccagggtcttgggggcaccctaccaccaaggacatttattaacaggaatgctgcaggtaccggccgtatgtctgcacccaggaattattctcgatctgggggcttcaaggaaggtcgtgctggttttaggcctgtggaagctggtgggcagcatggtggccggtctggtgagactgttaagcatgagattagttaccggtcacggcgcctagagcagacttctgtgagggatccatctccagaagcagatgctccagtgcttggcagtcctgagaaggaagaggcagcctcagagccaccagctgctgctcctgatgctgcaccaccaccccctgataggcccattgagaagaaatcctattcccgggcaagaagaactcgaaccaaagttggagatgcagtcaagcttgcagaggaggtgccccctcctcctgaaggactgattccagcacctccagtcccagaaaccaccccaactccacctactaagactgggacctgggaagctccggtggattctagtacaagtggacttgagcaagatgtggcacaactaaatatagcagaacagaattggagtccggggcagccttctttcctgcaaccacgggaacttcgaggtatgcccaaccatatacacatgggagcaggacctccacctcagtttaaccggatggaagaaatgggtgtccagggtggtcgagccaaacgctattcatcccagcggcaaagacctgtgccagagccccccgcccctccagtgcatatcagtatcatggagggacattactatgatccactgcagttccagggaccaatctatacccatggtgacagccctgccccgctgcctccacagggcatgcttgtgcagccaggaatgaaccttccccacccaggtttacatccccaccagacaccagctcctctgcccaatccaggcctctatcccccaccagtgtccatgtctccaggacagccaccacctcagcagttgcttgctcctacttacttttctgctccaggcgtcatgaactttggtaatcccagttacccttatgctccaggggcactgcctcccccaccaccgcctcatctgtatcctaatacacaggccccatcacaggtatatggaggagtgacctactataaccccgcccagcagcaggtgcagccaaagccctccccaccccggaggactccccagccagtcaccatcaagccccctccacctgaggttgtaagcaggggttccagttaatacaagtttctgaatattttaaatcttaacatcatataaaaagcagcagaggtgagaactcagaagagaaatacagctggctatctactaccagaagggcttcaaagatatagggtgtggctcctaccagcaaacagctgaaagaggaggacccctgccttcctctgaggacaggctctagagagagggagaaacaagtggacctcgtcccatcttcactcttcacttgagttggctgtgttcgggggagcagagagagccagacagccccaagcttctgagtctagatacagaagcccatgtcttctgctgttcttcacttctgggaaattgaagtgtcttctgttcccaaggaagctccttcctgtttgttttgttttctaagatgttcatttttaaagcctggcttcttatccttaatattattttaattttttctctttgtttctgtttcttgctctctctccctgcctttaaatgaaacaagtctagtcttctggttttctagcccctctggattcccttttgactcttccgtgcatcccagataatggagaatgtatcagccagccttccccaccaagtctaaaaagacctggcctttcacttttagttggcatttgttatcctcttgtatacttgtattcccttaactctaaccctgtggaagcatggctgtctgcacagagggtcccattgtgcagaaaagctcagagtaggtgggtaggagcccttctctttgacttaggtttttaggagtctgagcatccatcaatacctgtactatgatgggcttctgttctctgctgagggccaataccctactgtggggagagatggcacaccagatgcttttgtgagaaagggatggtggagtgagagcctttgcctttaggggtgtgtattcacatagtcctcagggctcagtcttttgaggtaagtggaattagagggccttgcttctcttctttccattcttcttgctacaccccttttccagttgctgtggaccaatgcatctctttaaaggcaaatattatccagcaagcagtctaccctgtcctttgcaattgctcttctccacgtctttcctgctacaagtgttttagatgttactaccttattttccccgaattctatttttgtccttgcagacagaatataaaaactcctgggcttaaggcctaaggaagccagtcaccttctgggcaagggctcctatctttcctccctatccatggcactaaaccacttctctgctgcctctgtggaagagattcctattactgcagtacatacgtctgccaggggtaacctggccactgtccctgtccttctacagaacctgagggcaaagatggtggctgtgtctctccccggtaatgtcactgtttttattccttccatctagcagctggcctaatcactctgagtcacaggtgtgggatggagagtggggagaggcacttaatctgtaacccccaaggaggaaataactaagagattcttctaggggtagctggtggttgtgccttttgtaggctgttccctttgccttaaacctgaagatgtctcctcaagcctgtgggcagcatgcccagattcccagaccttaagacactgtgagagttgtctctgttggtccactgtgtttagttgcaaggatttttccatgtgtggtggtgttttttgttactgttttaaagggtgcccatttgtgatcagcattgtgacttggagataataaaatttagactataaacttggctccctaaaaaaaaaaaaaaaaaa

SEQ ID NO: 549 - DNA, 1402 bp, Homo sapiens
  ref <308>: DATABASE ACCESSION NUMBER: NCBI / NM_017510
  ref <309>: DATABASE ENTRY DATE: 2011-11-27
  ref <313>: RELEVANT RESIDUES IN SEQ ID NO: (1)..(1402)
aagatggctgtggagctgggcgtgctgctcgtccggccccggcccggaaccgggctgggtagagtgatgcggaccctcctgctggtgctgtggctggcgacgcgcggaagcgcgctctactttcacatcggagagacggagaagaagtgctttattgaggagatcccggacgagaccatggtcataggaaactaccggacgcagctgtatgacaagcagcgggaggagtaccagccggccaccccggggcttggcatgtttgtggaggtgaaggacccagaggacaaggtcatcctggcccggcagtatggctccgagggcaggttcactttcacttcccatacccctggtgagcaccagatctgtcttcactccaattccaccaagttctccctctttgctggaggcatgctgagagttcacctggacatccaggtaggtgaacatgccaatgactatgcagaaattgctgctaaagacaagttgagtgagttgcagctacgagtgcgacagctggtggaacaagtggagcagatccagaaagagcagaactaccagcggtggcgagaggagcgcttccggcagaccagtgagagcaccaaccagcgggtgctgtggtggtccattctgcagaccctcatcctcgtggccatcggtgtctggcagatgcggcacctcaagagcttctttgaagccaagaagcttgtgtagctgtcccaggcgtcacaacccatcctcccaggctgggggagaaaggacctcctggaactgacttcttctgtcaggaggactggtttccagccatacctgttctggaagggagaggggctggaggcacccacaggcacaagctgaaggcagcagcttggctaatactgagcaggtagtggggcaaattcctgccctctctctctggcctctgggccgtttggtagtaatcacccaagggctggtaaagcccctcctcttggcacctcagaatcacagtgttactgatcagggatgtgaggctgctgttgggggtggggggaggggaatgggcaggcaagccagtcttctgtcttcctttgctaacttagggttttgagcaggttggggtatggtgcctgtcatacccacctgccaccctgggaacctcactgttctctctttcagcctagacctgctgatccagggtgtgtgtgagttgagggtgggtggaggggtttgcagtgtgggaatgtggccctgcagttgacctgagctgcttcacatggttgtccattctggggcttaaagaactgggaccagaccaagtagaggccttggtgctggttggggtggggcctgcagagtcttagttactgatttcattttcaataaatgtaggtttgttacatgagtttcccaataaaaaaaaaaa

SEQ ID NO: 550 - DNA, 1455 bp, Homo sapiens
  ref <308>: DATABASE ACCESSION NUMBER: NCBI / NM_015399
  ref <309>: DATABASE ENTRY DATE: 2011-12-24
  ref <313>: RELEVANT RESIDUES IN SEQ ID NO: (1)..(1455)
aagcaccgataggctctgcctcccgaagaaaagggagccgcgcagcgcctacgggagtccggcggcagcagccggtaccggcaaccacgggcagctctcagggaatctccgtcgtgaggccagaggctccagtccccgcgagtccagatgcctgtccagcctccaagcaaagacacagaagagatggaagcagagggtgattctgctgctgagatgaatggggaggaggaagagagtgaggaggagcggagcggcagccagacagagtcagaagaggagagctccgagatggatgatgaggactatgagcgacgccgcagcgagtgtgtcagtgagatgctggacctagagaagcagttctcggagctaaaggagaagttgttcagggaacgactgagtcagctgcggttgcggctggaggaagtgggggctgagagagcccctgaatacacggagccccttggggggctgcagcggagcctcaagattcgcattcaggtggcagggatctacaagggcttctgtctggatgtgatcaggaataagtacgaatgtgagctgcagggagccaaacagcacctggagagtgagaagctgctgctctatgacacgctgcagggggagctgcaggagcggatccagaggctggaggaggaccgccagagcctggacctcagctctgaatggtgggatgacaaactgcacgccagaggcagctccaggtcttgggactccctgccgcccagcaagaggaagaaggcacctctggtttctggcccatacatcgtgtacatgcttcaagagatcgacatcctggaggactggacagccatcaaaaaggctagggcagctgtgtcccctcagaagagaaaatcggatggaccttgaccctgctgttcacagccagggggaccctcagagcagctggcactgcacccaggattctcgtcttcctcctgcagacaggcggacccacaggcccctcagggtctgcccagccaggctcctgtggtgctgctgggccctcccactccatctggcactggcctggactcctcctctgccctcctcgaggcctgcacagctgtggccgtggagctgacctgaccaggcaaggctgctgtctccatccctgagccgcctgccacctcccactcctgaagatccatctcttggggctcccctgacagagaagacagccgaagtcaaagccacatcctcttgctgatgttggatgcaggctgtccggcctcagggccagggagccagtttccactgtgcgggaactctgagtcagacgtgattatctgggggtctgtccaccctggctggatctggaggcaagatgccaggccccccaggtgttctcagggcagttcttggtgtctgcttctcagattccaaggactggaattaaaacctttcctgggactctggaaaaaaaaaaaaaaaaaa

SEQ ID NO: 551 - DNA, 1127 bp, Homo sapiens
  ref <308>: DATABASE ACCESSION NUMBER: NCBI / NM_014508
  ref <309>: DATABASE ENTRY DATE: 2011-11-19
  ref <313>: RELEVANT RESIDUES IN SEQ ID NO: (1)..(1127)
ttaaagagggctgctcaactgcaaggacgctgtaagcaggaagagaagccacagcgcttcagaaaagagtgggacagggacaagcatatctaagaggctgaacatgaatccacagatcagaaacccgatgaaggcaatgtatccaggcacattctacttccaatttaaaaacctatgggaagccaacgatcggaacgaaacttggctgtgcttcaccgtggaaggtataaagcgccgctcagttgtctcctggaagacgggcgtcttccgaaaccaggtggattctgagacccattgtcatgcagaaaggtgcttcctctcttggttctgcgacgacatactgtctcctaacacaaagtaccaggtcacctggtacacatcttggagcccttgcccagactgtgcaggggaggtggccgagttcctggccaggcacagcaacgtgaatctcaccatcttcaccgcccgcctctactacttccagtatccatgttaccaggaggggctccgcagcctgagtcaggaaggggtcgctgtggagatcatggactatgaagattttaaatattgttgggaaaactttgtgtacaatgataatgagccattcaagccttggaagggattaaaaaccaactttcgacttctgaaaagaaggctacgggagagtctccagtgaggggtctccctgggcctcatggtctgtctcctctagcctcctgctcatgctgcacgggcctcccctccaccctggacccgctctgtttctgcctggtcatcctgagcccctcctggcctcagggccattccacagtgctcccctgcctcaccgcttcctcctcgctcttccagactcttcctgcagaggctcctttctgcctccatggctatccatccacccccacagaccccgttcctccagcctgcgtgcccctaacctggcttttcccatctccccagcataaccaaatcttactaaactcatcctaggctgggcatggtgactcacgcctgtaatcccccagcaatttgggaggcaaaggtgggagaatcgcgtgagcccaggagttccagaccaggctgggtcacatgacaaagccccatctctacaaaaaaaaaaaaaaaaaaaa

SEQ ID NO: 552 - DNA, 971 bp, Homo sapiens
  ref <308>: DATABASE ACCESSION NUMBER: NCBI / NM_018955
  ref <309>: DATABASE ENTRY DATE: 2011-11-20
  ref <313>: RELEVANT RESIDUES IN SEQ ID NO: (1)..(971)
cactcgttgcataaatttgcgctccgccagcccggagcatttaggggcggttggctttgttgggtgagcttgtttgtgtccctgtgggtggacgtggttggtgattggcaggatcctggtatccgctaacaggtcaaaatgcagatcttcgtgaaaacccttaccggcaagaccatcacccttgaggtggagcccagtgacaccatcgaaaatgtgaaggccaagatccaggataaggaaggcattccccccgaccagcagaggctcatctttgcaggcaagcagctggaagatggccgtactctttctgactacaacatccagaaggagtcgaccctgcacctggtcctgcgtctgagaggtggtatgcagatcttcgtgaagaccctgaccggcaagaccatcaccctggaagtggagcccagtgacaccatcgaaaatgtgaaggccaagatccaggataaagaaggcatccctcccgaccagcagaggctcatctttgcaggcaagcagctggaagatggccgcactctttctgactacaacatccagaaggagtcgaccctgcacctggtcctgcgtctgagaggtggtatgcagatcttcgtgaagaccctgaccggcaagaccatcactctggaggtggagcccagtgacaccatcgaaaatgtgaaggccaagatccaagataaagaaggcatcccccccgaccagcagaggctcatctttgcaggcaagcagctggaagatggccgcactctttctgactacaacatccagaaagagtcgaccctgcacctggtcctgcgcctgaggggtggctgttaattcttcagtcatggcattcgcagtgcccagtgatggcattactctgcactatagccatttgccccaacttaagtttagaaattacaagtttcagtaatagctgaacctgttcaaaatgttaataaaggtttcgttgcatggta

SEQ ID NO: 553 - DNA, 1868 bp, Homo sapiens
  ref <308>: DATABASE ACCESSION NUMBER: NCBI / NM_006368
  ref <309>: DATABASE ENTRY DATE: 2011-11-26
  ref <313>: RELEVANT RESIDUES IN SEQ ID NO: (1)..(1868)
ggaagcgagggtgcggcgcaatccggagaggacgccaggacgacgcccgagttccctttcaggctagaactcttcctttttctagcttggggtagaaggcggagccggagccccggaacccccgccctcggggtgcgaggcggcagcagggccgtcccctacatttgcatagcccctgggacgtggcgctgcacccaagcctcttctcagttggagggaactccaagtcccacagtgccacggggtggggtgcgtcactttcgctgcgttggaggctgaggagaattgagcctgggaggcgggtccggagagggctatggaaagccgccggcggggaatcccggccgtagagggacagtggataggtgcccgaggcctacagctggcctggggctcgtgtctgggcttcggacgttggggcccggtggcccaccctttccgtagttgtcccaaatggagctggaattggatgctggtgaccaagacctgctggccttcctgctagaggaaagtggagatttggggacggcacccgatgaggccgtgagggccccactggactgggcgctgccgctttctgaggtaccgagcgactgggaagtagatgatttgctgtgctccctgctgagtcccccagcgtcgttgaacattctcagctcctccaacccctgccttgtccaccatgaccacacctactccctcccacgggaaactgtctctatggatctagagagtgagagctgtagaaaagaggggacccagatgactccacagcatatggaggagctggcagagcaggagattgctaggctagtactgacagatgaggagaagagtctattggagaaggaggggcttattctgcctgagacacttcctctcactaagacagaggaacaaattctgaaacgtgtgcggaggaagattcgaaataaaagatctgctcaagagagccgcaggaaaaagaaggtgtatgttgggggtttagagagcagggtcttgaaatacacagcccagaatatggagcttcagaacaaagtacagcttctggaggaacagaatttgtcccttctagatcaactgaggaaactccaggccatggtgattgagatatcaaacaaaaccagcagcagcagcacctgcatcttggtcctactagtctccttctgcctcctccttgtacctgctatgtactcctctgacacaagggggagcctgccagctgagcatggagtgttgtcccgccagcttcgtgccctccccagtgaggacccttaccagctggagctgcctgccctgcagtcagaagtgccgaaagacagcacacaccagtggttggacggctcagactgtgtactccaggcccctggcaacacttcctgcctgctgcattacatgcctcaggctcccagtgcagagcctcccctggagtggccattccctgacctcttctcagagcctctctgccgaggtcccatcctccccctgcaggcaaatctcacaaggaagggaggatggcttcctactggtagcccctctgtcattttgcaggacagatactcaggctagatatgaggatatgtggggggtctcagcaggagcctggggggctccccatctgtgtccaaataaaaagcggtgggcaagggctggccgcagctcctgtgccctgtcaggacgactgagggctcaaacacaccacacttaatggctttctgggtcttttatttgtacccatgtgtctgtcacaccatgaatgtacctggggaaatcaactgacctccctgaacatttcacgcagtcagggaacaggtgaggaaagaaataaataagtgattctaatgctgcctaaaaaaaaaaaaaaaaaa

SEQ ID NO: 554 - DNA, 4880 bp, Homo sapiens
  ref <308>: DATABASE ACCESSION NUMBER: NCBI / NM_015024
  ref <309>: DATABASE ENTRY DATE: 2011-09-25
  ref <313>: RELEVANT RESIDUES IN SEQ ID NO: (1)..(4880)
aggcgcagcggcgacggcgtcggcggcggcggcggcagcggctccggccgaggtgcgcgctgggggggagggggggccggagaggagcatgaatggagcaaaatggcggatcatgtgcagagcctggcccaactagagaatctgtgcaaacagctgtatgaaaccacagacacaaccactcgactccaggcagagaaagccttggttgaatttaccaacagccctgattgcctgagcaagtgccagctactcctcgaaagaggaagttcctcttactcccagttactggcagctacatgccttaccaagcttgtatcacgcacaaacaaccccctaccattggaacagcgaatagatattcggaactatgtgctcaactaccttgccactcggccgaagttggctactttcgtgacacaagcacttattcagttatatgccagaatcacaaaactgggctggtttgactgtcagaaggatgactatgtcttcagaaatgcaatcacagacgtcacaaggtttttacaggatagtgttgaatactgcatcattggtgtcacaattttatctcagctaaccaatgaaattaatcaagcagacaccacccatcctttaaccaagcacagaaaaatagcctcttcttttcgcgattcatcattatttgatatcttcacactttcctgcaatttactaaaacaggcttcaggaaagaatctaaacttgaatgatgaaagtcagcatggcttgctcatgcaactgctcaagctcactcataactgcctcaactttgacttcatcggcacttccactgatgagtcctcagacgacctgtgtacagtgcagattcccaccagctggagatcagccttcttagattcttcaaccttgcagctgttttttgacctgtatcattccatccctccttcattttcacctctggtattatcctgcttggtacagatcgcttcagtcagaagatccctgtttaacaatgcagagagggccaagtttctctctcatcttgttgatggtgttaaacgaatactggaaaacccacagagtttatcagacccaaacaattaccatgagttttgcagactactggcccgattgaagagtaactatcaactgggagaattggtaaaggtggaaaactaccctgaggtcatccgattgatagccaacttcacagtgaccagcctacagcactgggaatttgctccaaatagtgtgcactatcttctgagcctgtggcagcggctggcagcctctgtgccgtatgtcaaagccacagagccccacatgctggaaacttacactcctgaggtcaccaaagcctacatcacatcccggttggaatctgtgcacatcatactgagagatggcctggaagatcccctggaggatacggggctggtccagcagcagttggaccagctgtccaccattgggcgttgtgaatatgagaagacgtgtgcactcctcgtgcagttgtttgaccagtcggcccagtcgtaccaggagctgctacagagcgccagcgcaagcccaatggacattgcagtgcaggagggaaggctgacatggctggtttacattattggagcagtgatcggtggccgggtttcttttgccagcactgatgagcaagacgccatggatggtgagcttgtctgtcgggtgctccagctgatgaacctaacagattctcgtttggcccaggcgggtaatgagaagctagagttggccatgctgagcttttttgaacagtttcgtaagatctacattggggaccaagtgcagaaatcctctaagctgtaccgccgactctcagaagttctgggcttgaatgatgagaccatggtcctaagcgtcttcataggaaaaatcatcaccaacttgaagtactggggccgttgtgaaccaatcacctccaagacactacagcttctcaatgacctgtccattgggtacagtagcgtaaggaagctagtgaagcttagtgcggtacagttcatgctgaacaatcacacgagcgagcacttttcatttttgggtattaacaatcagtccaacctgacagacatgcggtgtcggactaccttctacacagcacttgggcgtctcctcatggtggatttaggagaggatgaagatcagtatgagcagttcatgctgccactcacagcagcatttgaggctgtggcccagatgtttagcaccaatagtttcaacgagcaggaggcaaagcgaactctagttggcctagtaagagacctgagagggatcgctttcgctttcaatgccaagaccagcttcatgatgctctttgaatggatatatccatcctatatgccaattctccaacgggcaattgagctctggtaccatgatccagcctgtactacacctgtactcaagttgatggctgaattggttcataataggtcccagcgactccagtttgatgtctcttcccccaatggcatcttactcttccgagaaaccagcaagatgataacaatgtatggcaatcgcatcctgacactaggagaggtcccaaaggatcaggtctatgctctgaagctcaagggcatctccatctgcttctccatgctgaaggctgctctcagtgggagttacgtcaatttcggagtctttcgtctctatggagacgatgccctggacaatgctctgcagaccttcatcaagctgctcctctctattcctcacagtgatctcttggattaccccaagctcagccagtcttattattcactactggaagtcctgacccaggaccatatgaactttattgcaagcctggaacctcacgtcatcatgtatattctctcttccatttctgaaggacttactgcacttgacaccatggtatgcacaggctgctgctcctgcctggaccacattgtgacatacctcttcaagcagctgtcacgtagcaccaagaagaggaccacacccctgaaccaggagagcgaccgctttctgcacatcatgcagcagcatccagagatgatccagcagatgctgtccacggtgctgaacatcatcatctttgaagactgtaggaaccagtggtctatgtcccgaccactacttggcttgatattgcttaatgaaaagtatttttctgacctaagaaacagtattgtgaacagccagccaccggagaagcagcaggccatgcacctgtgttttgagaacctgatggaaggcatcgagcgaaatcttcttacgaaaaacagagacaggttcacccagaacctgtcagcattccgtcgagaagtcaacgactcaatgaagaattccacttatggcgtgaatagcaatgacatgatgagctgacacctccttggactctacctgtacagagcagcgtccctttggtttggcccagaggggcgaacaattgcaagggagagggcctggctgatcctggctcttttctccaggggtgtggggaaaatggcaaaggtcaactagctgcttccccagggaataggggtgtgagtacactcactagggggcagggcgctgctggttcctgggggactgggtgggaagggtggtgggaggagataagagatacaaactgagactccagcctctcctcctggggccacccaagtggggagaacccctagtgtcctgccacaacctgccttgtataaacatgtacattttttcataacattttgaacaaggtttatattgactcaagtttaaaaacaaaaagtgtgactgaaaaatttttacagagtctagtgcaccaatgctgatgtgaggggttgtgtatgcgagtgaagaaaatgtgtattctggtggcctgaagctttactggacaaggatgtgtgagagtgcagagatatatttagtgacacagtagagaggcaaaaaaaaagctaaaattccaaatgtatattttttcgtattgccctgtcctcacccagaaatgatcaattcctgttactgtattaacccttgttattaggaactctaagccatgccagaacaccgtccctccccttggaccgtgtagattctgccctgggtccctagccccttgcagtgataaataactccagctaaaagtgtttggtgttcttatctccaccctctttcctactttgcttaccctcatcctcagacagatgcctcttgcttttaaaagttggatttaacgacgtgttgtagggttcttggtctgtgtgaaggcagagaccagagagaaggaagtgagcccactgctctcctgggagcaatgtgggtgagtccaccagaggccctgctgtgtgtggccaataaattttagtcttccccagccctcgaggcagtgtgtgtggatgtatgcgtgtggatatttatatatgtaccctgcactcatgaatgtatgaactggaggaagttactacagtggaagggttcttaataacaaggtctacctagcatgaagtatttaacattctcccatcccttaaaaaatatacatttttataaaatgaaaaccataataaatgttttgaatattaaaaaaaataataacctacagaggaaaattaatggagacagctatttgccttgtactttttccacaattgttgctgctagttgtacacatctctagttcagctcttgcccacgggacactcatcaattaggttttatttttatttctttcctctacccccagaaacaagcctgttaattttttttccttctcctctggcgactgtgtgatgaatcctttcttgcgtgatcaggttgcggatagacttgtaagggtgtttgctgcatacagtgtaagcattgtgaccgccaataaacttcaatggtttctactgaaaaaaaaaaaaaaaaaa

SEQ ID NO: 555 - DNA, 1314 bp, Homo sapiens
  ref <308>: DATABASE ACCESSION NUMBER: NCBI / NM_031420
  ref <309>: DATABASE ENTRY DATE: 2011-08-15
  ref <313>: RELEVANT RESIDUES IN SEQ ID NO: (1)..(1314)
ggcgcgccgcaggcagcactggcgggggcctttcctgccgccgacgccggggtcctccctcaggtctcattctgtgcctgtgaacatggcggcgcccgttgtcacggccccgggcagagctctgctgcgggcgggcgctggacggctgcttcggggaggcgtccaggagctactgcggccgcgacatgaagggaacgcccctgacctggcctgcaacttcagcctttctcaaaatcggggcacggtcatcgtggagcgctggtggaaggtaccgctggccggggagggccggaagccgcgcctgcaccggcgacatcgcgtctataagctggtggaggacacgaagcatcggcccaaagaaaacctggagctcatcctgacgcagtcggtggagaatgttggagtccggggtgacctggtctcagtgaagaaatctttaggccggaatcgactccttcctcagggactggctgtatatgcatcccctgaaaacaagaagctgtttgaagaggagaaattgctgagacaagaaggaaaattagagaagatccagaccaaggcaggtgaggcgacagtgaaatttctaaaaagctgtcgcctggaggtagggatgaagaacaatgtcaaatgggagctgaaccctgaaatagttgcccgccacttctttaagaatcttggtgttgtggttgccccacatacattaaagttaccagaagagcctatcacacggtggggcgagtattggtgtgaggtgacggtaaatgggcttgatactgtgagagtgcctatgtctgtcgtgaactttgagaagcccaagaccaaaagatataagtactggttagcccagcaagctgccaaggctatggcccccaccagcccccagatctaaatctactctccctccaaggcagcaaagcagaatcgggagcagtggagcagaaatgtgcaagcaccctgatctcactcccagctctgaccaaatacagaattttagagaacatctgaagacatcagactgcactgcgtatacatgttgaattcttcatttttgccatctttaactgtcatcactggggcagggaagtcctgttccagaagtaccaggctgtagatttgataagctagatgcagtagaccgaaaccatccaaaacctgtttagcttcttcctccattggagtttattgggacaaacaggagagccagccattgtctccagtacttgcctcattctcatcatccaaactgaacatttgtatcccaagcagaaataaagagaatatgttctttttaaaaaaaaaaaaaaaaaaaaaaaa

SEQ ID NO: 556 - DNA, 1151 bp, Homo sapiens
  ref <308>: DATABASE ACCESSION NUMBER: NCBI / NM_013232
  ref <309>: DATABASE ENTRY DATE: 2011-11-21
  ref <313>: RELEVANT RESIDUES IN SEQ ID NO: (1)..(1151)
gataatgccaggccctgcccccggcagaggcggaagcggagtcggcctgagaggtctctcgtcgctgcaggcgcctcagcccagccgcgtgccttggcccatggccgcctactcttaccgccccggccctggggccggccctgggcctgctgcaggcgcggcgctgccggaccagagcttcctgtggaacgttttccagagggtcgataaagacaggagtggagtgatatcagacaccgagcttcagcaagctctctccaacggcacgtggactccctttaatccagtgactgtcaggtcgatcatatccatgtttgaccgtgagaacaaggccggcgtgaacttcagcgagttcacgggtgtgtggaagtacatcacggactggcagaacgtcttccgcacgtacgaccgggacaactccgggatgatcgataagaacgagctgaagcaggccctctcaggtttcggctaccggctctctgaccagttccacgacatcctcattcgaaagtttgacaggcagggacgggggcagattgccttcgacgacttcatccagggctgcatcgtcctgcagaggttgacggatatattcagacgttacgacacggatcaggacggctggattcaggtgtcgtacgaacagtacctgtccatggtcttcagtatcgtatgaccctggcctctcgtgaagagcagcacaacatggaaagagccaaaatgtcacagttcctatctgtgagggaatggagcacaggtgcagttagatgctgttcttcctttagattttgtcacgtggggacccagctgtacatatgtggataagctgattaatggttttgcaactgtaatagtagctgtatcgttctaatgcagacattggatttggtgactgtctcattgtgccatgaggtaaatgtaatgtttcaggcattctgcttgcaaaaaaatctatcatgtgcttttctagatgtctctggttctatagtgcaaatgcttttattagccaataggaattttaaaataacatggaacttacacaaaaggcttttcatgtgccttacttttttaaaaaggagtttattgtattcattggaatatgtgacgtaagcaataaagggaatgttagacgtgtaaaaaaaaaaaaaaaa

SEQ ID NO: 557 - DNA, 1665 bp, Homo sapiens
  ref <308>: DATABASE ACCESSION NUMBER: NCBI / NM_005917
  ref <309>: DATABASE ENTRY DATE: 2011-12-04
  ref <313>: RELEVANT RESIDUES IN SEQ ID NO: (1)..(1665)
gcgcgtgggggtgatgtcgctaaggggtgattctcccctccctagagttacacacgctatctctcccgccaattgccgggctccatcaggcaggtcctttcctcctgagcccaaaccatccgtttgttgtcgtcctccaatcacaggggctcatcctcagggactactttgcaatcggcgcagagcgcagtgagaagagcttgaaaaaaacctctggtatcgggaagtgtagttcaacacttgaaggaaatgctttggagattgcgccacaaccagggcagcgtaaactacagttcccagagagcgccgcgtcgggagcggagccttttctcgctaacaccgctcgccctctccgagtcagttccgcggtagaggtgacctgactctctgaggctcattttgcagttgttgaaattgtccccgcagttttcaatcatgtctgaaccaatcagagtccttgtgactggagcagctggtcaaattgcatattcactgctgtacagtattggaaatggatctgtctttggtaaagatcagcctataattcttgtgctgttggatatcacccccatgatgggtgtcctggacggtgtcctaatggaactgcaagactgtgcccttcccctcctgaaagatgtcatcgcaacagataaagaagacgttgccttcaaagacctggatgtggccattcttgtgggctccatgccaagaagggaaggcatggagagaaaagatttactgaaagcaaatgtgaaaatcttcaaatcccagggtgcagccttagataaatacgccaagaagtcagttaaggttattgttgtgggtaatccagccaataccaactgcctgactgcttccaagtcagctccatccatccccaaggagaacttcagttgcttgactcgtttggatcacaaccgagctaaagctcaaattgctcttaaacttggtgtgactgctaatgatgtaaagaatgtcattatctggggaaaccattcctcgactcagtatccagatgtcaaccatgccaaggtgaaattgcaaggaaaggaagttggtgtttatgaagctctgaaagatgacagctggctcaagggagaatttgtcacgactgtgcagcagcgtggcgctgctgtcatcaaggctcgaaaactatccagtgccatgtctgctgcaaaagccatctgtgaccacgtcagggacatctggtttggaaccccagagggagagtttgtgtccatgggtgttatctctgatggcaactcctatggtgttcctgatgatctgctctactcattccctgttgtaatcaagaataagacctggaagtttgttgaaggtctccctattaatgatttctcacgtgagaagatggatcttactgcaaaggaactgacagaagaaaaagaaagtgcttttgaatttctttcctctgcctgactagacaatgatgttactaaatgcttcaaagctgaagaatctaaatgtcgtctttgactcaagtaccaaataataataatgctatacttaaattacttgtgaaaaacaacacattttaaagattacgtgcttcttggtacaggtttgtgaatgacagtttatcgtcatgctgttagtgtgcattctaaataaatatatattcaaatgaaaaaaaaaaaaaaaaaa

SEQ ID NO: 558 - DNA, 3668 bp, Homo sapiens
  ref <308>: DATABASE ACCESSION NUMBER: NCBI / NM_032801
  ref <309>: DATABASE ENTRY DATE: 2011-12-04
  ref <313>: RELEVANT RESIDUES IN SEQ ID NO: (1)..(3668)
tagacctcagcttcctctgtcaccatggtgccggctcggctgggcccggcggtcgccatggtaactggggcgggtcgcagggtcctggcaggctgggcgcatgcgcgcggggactacaagccgcgccgcgctgccgctggcccctcagcaaccctcgacatggcgctgaggcggccaccgcgactccggctctgcgctcggctgcctgacttcttcctgctgctgcttttcaggggctgcctgataggggctgtaaatctcaaatccagcaatcgaaccccagtggtacaggaatttgaaagtgtggaactgtcttgcatcattacggattcgcagacaagtgaccccaggatcgagtggaagaaaattcaagatgaacaaaccacatatgtgttttttgacaacaaaattcagggagacttggcgggtcgtgcagaaatactggggaagacatccctgaagatctggaatgtgacacggagagactcagccctttatcgctgtgaggtcgttgctcgaaatgaccgcaaggaaattgatgagattgtgatcgagttaactgtgcaagtgaagccagtgacccctgtctgtagagtgccgaaggctgtaccagtaggcaagatggcaacactgcactgccaggagagtgagggccacccccggcctcactacagctggtatcgcaatgatgtaccactgcccacggattccagagccaatcccagatttcgcaattcttctttccacttaaactctgaaacaggcactttggtgttcactgctgttcacaaggacgactctgggcagtactactgcattgcttccaatgacgcaggctcagccaggtgtgaggagcaggagatggaagtctatgacctgaacattggcggaattattgggggggttctggttgtccttgctgtactggccctgatcacgttgggcatctgctgtgcatacagacgtggctacttcatcaacaataaacaggatggagaaagttacaagaacccagggaaaccagatggagttaactacatccgcactgacgaggagggcgacttcagacacaagtcatcgtttgtgatctgagacccgcggtgtggctgagagcgcacagagcgcacgtgcacatacctctgctagaaactcctgtcaaggcagcgagagctgatgcactcggacagagctagacactcattcagaagcttttcgttttggccaaagttgaccactactcttcttactctaacaagccacatgaatagaagaattttcctcaagatggacccggtaaatataaccacaaggaagcgaaactgggtgcgttcactgagttgggttcctaatctgtttctggcctgattcccgcatgagtattagggtgatcttaaagagtttgctcacgtaaacgcccgtgctgggccctgtgaagccagcatgttcaccactggtcgttcagcagccacgacagcaccatgtgagatggcgaggtggctggacagcaccagcagcgcatcccggcgggaacccagaaaaggcttcttacacagcagccttacttcatcggcccacagacaccaccgcagtttcttcttaaaggctctgctgatcggtgttgcagtgtccattgtggagaagctttttggatcagcattttgtaaaaacaaccaaaatcaggaaggtaaattggttgctggaagagggatcttgcctgaggaaccctgcttgtccaacagggtgtcaggatttaaggaaaaccttcgtcttaggctaagtctgaaatggtactgaaatatgcttttctatgggtcttgtttattttataaaattttacatctaaatttttgctaaggatgtattttgattattgaaaagaaaatttctatttaaactgtaaatatattgtcatacaatgttaaataacctatttttttaaaaaagttcaacttaaggtagaagttccaagctactagtgttaaattggaaaatatcaataattaagagtattttacccaaggaatcctctcatggaagtttactgtgatgttccttttctcacacaagttttagcctttttcacaagggaactcatactgtctacacatcagaccatagttgcttaggaaacctttaaaaattccagttaagcaatgttgaaatcagtttgcatctcttcaaaagaaacctctcaggttagctttgaactgcctcttcctgagatgactaggacagtctgtacccagaggccacccagaagccctcagatgtacatacacagatgccagtcagctcctggggttgcgccaggcgcccccgctctagctcactgttgcctcgctgtctgccaggaggccctgccatccttgggccctggcagtggctgtgtcccagtgagctttactcacgtggcccttgcttcatccagcacagctctcaggtgggcactgcagggacactggtgtcttccatgtagcgtcccagctttgggctcctgtaacagacctctttttggttatggatggctcacaaaatagggcccccaatgctattttttttttttaagtttgtttaattatttgttaagattgtctaaggccaaaggcaattgcgaaatcaagtctgtcaagtacaataacatttttaaaagaaaatggatcccactgttcctctttgccacagagaaagcacccagacgccacaggctctgtcgcatttcaaaacaaaccatgatggagtggcggccagtccagccttttaaagaacgtcaggtggagcagccaggtgaaaggcctggcggggaggaaagtgaaacgcctgaatcaaaagcagttttctaattttgactttaaatttttcatccgccggagacactgctcccatttgtggggggacattagcaacatcactcagaagcctgtgttcttcaagagcaggtgttctcagcctcacatgccctgccgtgctggactcaggactgaagtgctgtaaagcaaggagctgctgagaaggagcactccactgtgtgcctggagaatggctctcactactcaccttgtctttcagcttccagtgtcttgggttttttatactttgacagcttttttttaattgcatacatgagactgtgttgactttttttagttatgtgaaacactttgccgcaggccgcctggcagaggcaggaaatgctccagcagtggctcagtgctccctggtgtctgctgcatggcatcctggatgcttagcatgcaagttccctccatcattgccaccttggtagagagggatggctccccaccctcagcgttggggattcacgctccagcctccttcttggttgtcatagtgatagggtagccttattgccccctcttcttataccctaaaaccttctacactagtgccatgggaaccaggtctgaaaaagtagagagaagtgaaagtagagtctgggaagtagctgcctataactgagactagacggaaaaggaatactcgtgtattttaagatatgaatgtgactcaagactcgaggccgatacgaggctgtgattctgcctttggatggatgttgctgtacacagatgctacagacttgtactaacacaccgtaatttggcatttgtttaacctcatttataaaagcttcaaaaaaacccaaacat

SEQ ID NO: 559 - DNA, 1759 bp, Homo sapiens
  ref <308>: DATABASE ACCESSION NUMBER: NCBI / NM_030662
  ref <309>: DATABASE ENTRY DATE: 2012-01-01
  ref <313>: RELEVANT RESIDUES IN SEQ ID NO: (1)..(1759)
cccctgcctctcggactcgggctgcggcgtcagccttcttcgggcctcggcagcggtagcggctcgctcgcctcagccccagcgcccctcggctaccctcggcccaggcccgcagcgccgcccgccctcggccgccccgacgccggcctgggccgcggccgcagccccgggctcgcgtaggcgccgaccgctcccggcccgccccctatgggccccggctagaggcgccgccgccgccggcccgcggagccccgatgctggcccggaggaagccggtgctgccggcgctcaccatcaaccctaccatcgccgagggcccatcccctaccagcgagggcgcctccgaggcaaacctggtggacctgcagaagaagctggaggagctggaacttgacgagcagcagaagaagcggctggaagcctttctcacccagaaagccaaggtcggcgaactcaaagacgatgacttcgaaaggatctcagagctgggcgcgggcaacggcggggtggtcaccaaagtccagcacagaccctcgggcctcatcatggccaggaagctgatccaccttgagatcaagccggccatccggaaccagatcatccgcgagctgcaggtcctgcacgaatgcaactcgccgtacatcgtgggcttctacggggccttctacagtgacggggagatcagcatttgcatggaacacatggacggcggctccctggaccaggtgctgaaagaggccaagaggattcccgaggagatcctggggaaagtcagcatcgcggttctccggggcttggcgtacctccgagagaagcaccagatcatgcaccgagatgtgaagccctccaacatcctcgtgaactctagaggggagatcaagctgtgtgacttcggggtgagcggccagctcatcgactccatggccaactccttcgtgggcacgcgctcctacatggctccggagcggttgcagggcacacattactcggtgcagtcggacatctggagcatgggcctgtccctggtggagctggccgtcggaaggtaccccatccccccgcccgacgccaaagagctggaggccatctttggccggcccgtggtcgacggggaagaaggagagcctcacagcatctcgcctcggccgaggccccccgggcgccccgtcagcggtcacgggatggatagccggcctgccatggccatctttgaactcctggactatattgtgaacgagccacctcctaagctgcccaacggtgtgttcacccccgacttccaggagtttgtcaataaatgcctcatcaagaacccagcggagcgggcggacctgaagatgctcacaaaccacaccttcatcaagcggtccgaggtggaagaagtggattttgccggctggttgtgtaaaaccctgcggctgaaccagcccggcacacccacgcgcaccgccgtgtgacagtggccgggctccctgcgtcccgctggtgacctgcccaccgtccctgtccatgccccgcccttccagctgaggacaggctggcgcctccacccaccctcctgcctcacccctgcggagagcaccgtggcggggcgacagcgcatgcaggaacgggggtctcctctcctgcccgtcctggccggggtgcctctggggacgggcgacgctgctgtgtgtggtctcagaggctctgcttccttaggttacaaaacaaaacagggagagaaaaagcaaaaaaaaaaaaaaaaaaaaaaaaaaaa

SEQ ID NO: 560 - DNA, 2545 bp, Homo sapiens
  ref <308>: DATABASE ACCESSION NUMBER: NCBI / NM_006268
  ref <309>: DATABASE ENTRY DATE: 2011-11-28
  ref <313>: RELEVANT RESIDUES IN SEQ ID NO: (1)..(2545)
agtgctcgctctagtgcgcgcgcccggacggcgcctgcgcagagggcaaggaacctggtaccccggtgcggtcccggcgcctgcgcgctgcggactgtggggcttctcggcccgaggcagaggaacagggaagatggcggctgtggtggagaatgtagtgaagctccttggggagcagtactacaaagatgccatggagcagtgccacaattacaatgctcgcctctgtgctgagcgcagcgtgcgcctgcctttcttggactcacagaccggagtagcccagagcaattgttacatctggatggaaaagcgacaccggggtccaggattggcctccggacagctgtactcctaccctgcccggcgctggcggaaaaagcggcgagcccatccccctgaggatccacgactttccttcccatctattaagccagacacagaccagaccctgaagaaggaggggctgatctctcaggatggcagtagtttagaggctctgttgcgcactgaccccctggagaagcgaggtgccccggatccccgagttgatgatgacagcctgggcgagtttcctgtgaccaacagtcgagcgcgaaagcggatcctagaaccagatgacttcctggatgacctcgatgatgaagactatgaagaagatactcccaagcgtcggggaaaggggaaatccaagggtaagggtgtgggcagtgcccgtaagaagctggatgcttccatcctggaggaccgggataagccctatgcctgtgacatttgtggaaaacgttacaagaaccgaccaggcctcagttaccactatgcccactcccacttggctgaggaggagggcgaggacaaggaagactctcaaccacccactcctgtttcccagaggtctgaggagcagaaatccaaaaagggtcctgatggattggccttgcccaacaactactgtgacttctgcctgggggactcaaagattaacaagaagacgggacaacccgaggagctggtgtcctgttctgactgtggccgctcagggcatccatcttgcctccaatttacccccgtgatgatggcggcagtgaagacataccgctggcagtgcatcgagtgcaaatgttgcaatatctgcggcacctccgagaatgacgaccagttgctcttctgtgatgactgcgatcgtggctaccacatgtactgtctcaccccgtccatgtctgagccccctgaaggaagttggagctgccacctgtgtctggacctgttgaaagagaaagcttccatctaccagaaccagaactcctcttgatgtggccacccacctgctccccgacatatctaaggctgtttctctcctccacttcatatttcatacccatctttcccttcttcctcctctccttcacaaatccagagaaccttggggtggttgtgccagcctgcctttggcagctgcaagctgaggtggcagctctgaccacctctggccccaggccctcagggagaaaggagcaacacactgcccctaggcgtgcgtgtggcccagtttctctctgctctccattaagtgcattcactctgcttgccttgggcccagcccctggtgatcacagggttcaaacagtgtcctcctagaaagagtgggagagcagctcacttctctgtgttctgcctcccctctggtctccagagttttcctgtcctctagaggcaagccaggccagggagctgggagcgagcaagctgaggccacgtccacaaggagcttttcatgcccctgtgccgcatagcctcacctctttcctccagagtggctctctgcggccctgtgttcctgctacagagtgttcttttctggagtcaggatgttctcggtcaccctcctggttctgccctgtcccattccaccccaccccagggggaacagtagcttcaccttgttattcccattgctctcctggctcactcttacggtcggtctccagtgactgaagcattccccacccttggaatttctcatcttctgcctcccttcctactccttttggttttgtggggagaggggaaggatcagggggccaggccagcagctcgggggccacaaggagatggataatgtgcctgttttttaacacaacaaaaaagcctacctccaaaatcccctttttgttcttcctggacctgggcattcagcctcctgctcttaactgaattgggagcctctgccacctgccccgtgtatcctggctctcagctcatggggaagccacatagacatccctttcttcccttgcacgctcgctagcagctggtaaggtcttcacaccctgattcctcaagttttctgcttagtggcactgacattaagtagtggggggacagtccatgccaggacaccctggagtagccttcccccttggccgtgggcaggccctaactcactgtcgctttggagttgaggtgtcttttttttttctttctttagttcctgtattctaaacattagtaaaaataaatgtttttacacagaaaaaaaaaaaaaaaa

SEQ ID NO: 561 - DNA, 2166 bp, Homo sapiens
  ref <308>: DATABASE ACCESSION NUMBER: NCBI / NM_006826
  ref <309>: DATABASE ENTRY DATE: 2011-12-18
  ref <313>: RELEVANT RESIDUES IN SEQ ID NO: (1)..(2166)
gtggtgggactcgcgtcgcggccgcggagacgtgaagctctcgaggctcctcccgctgcgggtcggcgctcgccctcgctctcctcgccctccgccccggccccggccccgcgcccgccatggagaagactgagctgatccagaaggccaagctggccgagcaggccgagcgctacgacgacatggccacctgcatgaaggcagtgaccgagcagggcgccgagctgtccaacgaggagcgcaacctgctctccgtggcctacaagaacgtggtcgggggccgcaggtccgcctggagggtcatctctagcatcgagcagaagaccgacacctccgacaagaagttgcagctgattaaggactatcgggagaaagtggagtccgagctgagatccatctgcaccacggtgctggaattgttggataaatatttaatagccaatgcaactaatccagagagtaaggtcttctatctgaaaatgaagggtgattacttccggtaccttgctgaagttgcgtgtggtgatgatcgaaaacaaacgatagataattcccaaggagcttaccaagaggcatttgatataagcaagaaagagatgcaacccacacacccaatccgcctggggcttgctcttaacttttctgtattttactatgagattcttaataacccagagcttgcctgcacgctggctaaaacggcttttgatgaggccattgctgaacttgatacactgaatgaagactcatacaaagacagcaccctcatcatgcagttgcttagagacaacctaacactttggacatcagacagtgcaggagaagaatgtgatgcggcagaaggggctgaaaactaaatccatacagggtgtcatccttctttccttcaagaaacctttttacacatctccattccttattccacttggatttcctatagcaaagaaacccattcatgtgtatggaatcaactgtttatagtcttttcacactgcagctttgggaaaacttcattccttgatttgtgtttgtcttggccttcctggtgtgcagtactgctgtagaaaagtattaatagcttcatttcatataaacataagtaactcccaaacacttatgtagaggactaaaaatgtatctggtatttaagtaatctgaaccagttctgcaagtgactgtgttttgtattactgtgaaaataagaaaatgtagttaattacaatttaaagagtattccacataacttcttaatttctacattccctcccttactcttcgggggtttcctttcagtaagcaacttttccatgctcttaatgtattcctttttagtaggaatccggaagtattagattgaatggaaaagcacttgccatctctgtctaggggtcacaaattgaaatggctcctgtatcacatacggaggtcttgtgtatctgtggcaacagggagtttccttattcactctttatttgctgctgtttaagttgccaacctcccctcccaataaaaattcacttacacctcctgcctttgtagttctggtattcactttactatgtgatagaagtagcatgttgctgccagaatacaagcattgcttttggcaaattaaagtgcatgtcatttcttaatacactagaaaggggaaataaattaaagtacacaagtccaagtctaaaactttagtacttttccatgcagatttgtgcacatgtgagagggtgtccagtttgtctagtgattgttatttagagagttggaccactattgtgtgttgctaatcattgactgtagtcccaaaaaagccttgtgaaaatgttatgccctatgtaacagcagagtaacataaaataaaagtacattttataaaccatttactatggctttgtaacaattgcatacccatattttaagggacaggtgaatttactactttctaaagtttattgatacttcccttttatgtaaaatgtagtagtgatacctatatttccacattgtgcattgtgacacacttgtctagggatgcctggaagtgtataaaattggactgcatttcttagagtgttttactatagatcagtctcatgggccatctcttcctcagatgtaaatgatatctggttaagtgttatatggaataaagtggacattttaaaacta

SEQ ID NO: 562 - DNA, 3381 bp, Homo sapiens
  ref <308>: DATABASE ACCESSION NUMBER: NCBI / NM_144582
  ref <309>: DATABASE ENTRY DATE: 2011-08-15
  ref <313>: RELEVANT RESIDUES IN SEQ ID NO: (1)..(3381)
gtcgtccgcggggcggggacgcggcggcggcggcggcggtggcggctgtgtgtcgccggagccgaagcgcgcaggcccgtcccggtggccggggagcgggcgggtgggggcgccatgtggttcatgtacctgctgagctggctgtcgctcttcatccaggtggccttcatcacgctggctgtcgcggctggactctattacctggcagaactgatagaagaatacacagtggccaccagcaggatcataaaatacatgatctggttctccaccgctgtactgattggcctctacgtctttgagcgcttccccaccagcatgattggagtgggcctattcaccaacctcgtctactttggcctcctccagaccttccccttcatcatgctgacctcgcctaacttcatcctgtcgtgtggactagtggtggtgaatcattacctagcatttcagttttttgcagaagaatattatcccttctcagaggtcctggcctatttcactttctgcctgtggataattccgtttgcgttttttgtgtcactttcggccggggagaacgtcctgccctctaccatgcagccaggagatgatgtcgtctccaattatttcaccaaaggcaagcggggcaaacgcttagggatcctggttgtcttctccttcatcaaagaggccattctacccagtcgtcagaagatatactgacccccatgcaggcaggatgtggggggcaagatcaggagagtcaggcccctgggcctctatgccaggtggggaccagaagtcgggaaggcacctaccacctgccctggctttcttcccctcaactctggagccccatccccaccctccttggggggctcagcttggctcagatctgatgcttcaagaggctgtaacctcagagggcaccaaggagggtggcagagcctgcttagccaggaggccgaggtccctcagtcctcccctgtcccttccaaggtgggtcaggaggttctggccccgctggggcaggcagggcagggtctgtgaagcttaagagcagatggtgacaagttctctgggcaggtggccatggggaggggccatggcttggcatgtccaacagaaatagtttttgctgttgaacggtgatttctgtccaagtgcagatttccgtttgaataaagcttcgcttctaggtggcactgtttgccttaataccctgacagttcatcttcctttcttcctgctaaccttctgctctggactggactcacttttctgctccagggactccttttctgggtttgggtcttgcccttcccaagggactgttcttgtggcccttaatgggaagggggcaggggtgaggagctgagcctgctcaaggagtgggaagtggggctataggcagcctctctgatgcactctcttccatctctttccccaaggctccgtgactgtcaaactgggagtaggagaggggacaatttaggactgggctagattttcagaagaacatctacaatatcctatttataaatcttcctctgggaaaaggagtggtttctggctgaatactatcttaggctcaaggagaaacaaaataaaaattagcttccaggcagcctgtttttaaagaaatgggactaatgggagaagctgtttgtcactctaagagcatccaagccctggcccgtctgtgcactcttggctcctggggagatatatctgccttctaagaaggcaggccaggtcttgggcacagacctgcatttgttgaccttgcactccaactatagtgccttgcaagtgctcaacagtacatattggaatgaagtccctatgagagccatttctggccatgttctatacctcaaagtgaggctggcaggtacagagatgaactgtacacatgtgatacatttaagccactggaaaaacccctgtgcttgaaaatatttcctctatatcatgcctggagttccatcatagcccttcatttccttggctttagcatttaccttctcttaagaataccagctttcccctttccctgagaggaagagcacatgttggtctcctcttagtgtgaacgagattgccaggcccttttctcctatgcacaccaggatagacaaggcaggggatactggcagcctgcatcatcctcccattgggctgacagctggccctactttcctccctctgctgcttggtccctcaccttgatgatgtggcttcgccccctccactctactgccagtgttctcccagggcttgctaaatccagcagacccctttcctgtcttactagatctgggcagcatttgacatggctgatcaccccttgcttcttggatggcacttccctggcacctctgtggctagttgtcctacctccctggctgttcctttcaggcttccgtgcaggcttctccacttgcccatgcacagtagggtctttcagggttctgctgtgggctccctagggaagcccatccatctggatggtttcaaggatggtgaggaatttagagttgacctccagccccaacatccttcctgatcacctgaaccacagttttgctgccctctaggtgcacagacaattcaggtccatggcccagatggtacttgctgtcttctgcaaacctgccccttctgggtacttcccttgaccccgagatcactcaggagccagacaggaaacttattctattcctgttttctctttctgcccaccacatccaatctctcaaaacggtcaggtctaccttaacatctcttgatttgagccactcccactgtcatcagctttcacctggattatcgtgacagcctcctactgcttctctatcatgtggccagagctatcttcctaaaatgcattgcatagttgatcaagtcactctctggcctaaaaccttccttggctccctgctgccctcaggataaagtctggacccctcagcatggcttgtgagactcatggtgtccttgtccctgctcacctctctggtctcatcacttgccttcttgcattctgggtcccagcctcctgtatccagagatgcagtggctctccattgccactctgattcctcctttcttttggtcacagagaaagggtactttctctgtcaaatctcaacttagacttgacttcctccaaggagctttggctatactctctcctcccgacccccaccctggcatactacacagatcactctgggctcacttgcctgcctaatggtcatctccccagtagactgtaagctccttgagggcaaggattgtgttggaatttttgtattaacagtgcctggcttggtgcctggcacctagaaagcactcaataaatgtttgtttaatgaatgaaaaaaaaaaaaaaaa

SEQ ID NO: 563 - DNA, 1923 bp, Homo sapiens
  ref <308>: DATABASE ACCESSION NUMBER: NCBI / NM_144565
  ref <309>: DATABASE ENTRY DATE: 2011-12-18
  ref <313>: RELEVANT RESIDUES IN SEQ ID NO: (1)..(1923)
cgcgcgaggtgagacggcgagggctcccggggcgcaggtagagatgttccgtcggtgccgaaggcccggctagtgcggttgtgtggacggcgaaaaaaaccaggccaggcgtcaaagcaagtcacccatccgacctaaacccctctaagaccctggagtcacgtctccctccggggatcctcgtgaggtcttgggggtcccaccgccctgcgagccgcgcccgcgccccgccagacccggaactgcgtcgctagaacgtcgggacctggttccctctttaatcacacccccgggggcgcttcgtgtgaggttccacgggggaaggcgagaggcgcaggctgccacacacgcactgtttggaagaggggaagcattgccccccctgcaccacctcaccaagatggctactttgggacacacattccccttctatgctggccccaagccaaccttcccgatggacaccactttggccagcatcatcatgatctttctgactgcactggccacgttcatcgtcatcctgcctggcattcggggaaagacgaggctgttctggctgcttcgggtggtgaccagcttattcatcggggctgcaatcctggctgtgaatttcagttctgagtggtctgtgggccaggtcagcaccaacacatcatacaaggccttcagttctgagtggatcagcgctgatattgggctgcaggtcgggctgggtggagtcaacatcacactcacagggacccccgtgcagcagctgaatgagaccatcaattacaacgaggagttcacctggcgcctgggtgagaactatgctgaggagtatgcaaaggctctggagaaggggctgccagaccctgtgttgtacctagctgagaagttcactccaagaagcccatgtggcctataccgccagtaccgcctggcgggacactacacctcagccatgctatgggtggcattcctctgctggctgctggccaatgtgatgctctccatgcctgtgctggtatatggtggctacatgctattggccacgggcatcttccagctgttggctctgctcttcttctccatggccacatcactcacctcaccctgtcccctgcacctgggcgcttctgtgctgcatactcaccatgggcctgccttctggatcacattgaccacaggactgctgtgtgtgctgctgggcctggctatggcggtggcccacaggatgcagcctcacaggctgaaggctttcttcaaccagagtgtggatgaagaccccatgctggagtggagtcctgaggaaggtggactcctgagcccccgctaccggtccatggctgacagtcccaagtcccaggacattcccctgtcagaggcttcctccaccaaggcatactatcgccccaggagactttccctggtgcctgcggatgtccgaggcctcgcgccagcagcgctcagtgcccttcctggagctctcctggcccaggcctggcgggcactgcttcccggcctgcgatgtcccaaggcggggaaggagtccagattgggtccccctcacagtccttggcgctttggtccagaagggtgcgaagagcgctgggccgaacatactggagactcaccacggcccctccgaggaagaggcacaggacgcctgtggcggtggggatcgaaagaaaggagggcatgtggagtcagggctatgttgcccaggctggtctcgaactctggcctcaaacgaccttcctgcctcgacctcccaaagtgctgggattacaggcgtgatgcccgggccttcttccatcttttggagcctaccccttgtgttacctcccgccacacacctctaatctgaattacatgaaacacggcaagacaccaaaaaaaaaaaaaaaaaaaaaaaaaaaaaaaaaaaaaaaaaaaaaa

SEQ ID NO: 564 - DNA, 1620 bp, Homo sapiens
  ref <308>: DATABASE ACCESSION NUMBER: NCBI / NM_005984
  ref <309>: DATABASE ENTRY DATE: 2011-12-18
  ref <313>: RELEVANT RESIDUES IN SEQ ID NO: (1)..(1620)
gcggccgccccgcccctgggaccataaccggccgccgccgccaccgcggaccgagcgcggagttctggagtctcggacccgaagccgccacagggcgccccgcctcccgcccgccatgcccgcgccccgcgccccgcgcgctctggcggccgccgcgcccgcgtccgggaaggccaagctgacgcacccggggaaggcgatcctggcaggcggcctggcgggtggcatcgagatctgcatcaccttccccaccgagtacgtgaagacgcagctgcagctggacgagcgctcgcacccgccgcggtaccggggcatcggggactgcgtgcggcagacggttcgcagccatggcgtcctgggcctgtaccgcggccttagctccctgctctacggttccatccccaaggcggccgtcaggtttggaatgttcgagttcctcagcaaccacatgcgggatgcccagggacggctggacagcacgcgtgggctgctgtgcggcctgggcgctggcgtggccgaggccgtggtggtcgtgtgccccatggagaccatcaaggtgaagttcatccacgaccagacctccccaaaccccaagtacagaggattcttccacggggttagggagattgtgcgggaacaagggctgaaggggacgtaccagggcctcacagccactgtcctgaagcagggctcgaaccaggccatccgcttcttcgtcatgacctccctgcgcaactggtaccgaggggacaaccccaacaagcccatgaaccctctgatcactggggtcttcggagctattgcaggcgcagccagtgtctttggaaacactcctctggatgtgattaagacccggatgcagggcctggaggcgcacaaataccggaacacgtgggactgcggcttgcagatcctgaagaaggaggggctcaaggcattctacaagggcactgtcccccgcctgggccgggtctgcctggatgtggccatagtgtttgtcatctatgatgaagtggtgaagctgctcaacaaagtgtggaagacggactaagcctagagaggccgcaaggggaccgccccaggcaccgccagagtgtcctgctacctttgtctcacgattccagtgcagtagtgccaaaaggccccttcccacgtccctcgagctctgtagcctggtctgtgcattgtggctgtcaaatccatgtgtcccccctgtggtctgtgtgtgacaccaccactgtgtcccagtgtctggcccagccatggctggatgtgcatctggcctatgaccctgtgcctgtgtttcatgttctgtgtcacgtgaccctgtgccccgcctcccggggtgcccgtgtggcctgggtcctcggccctgtagccctggcccggtcccagtccggtgccttccaccctgccctggcctaccacagctgcctccgggcctcggcctggcttcaccgcattccaggggctgcagccccctgcttctcccgccattggccttaactggccctcgggccctctctccgccccggacagggtggcacccaccactctcaggaccaccctgccaaggcagaataaaccggatcctgttgcaaaaaaaaaaaaaaaaaaaaa

SEQ ID NO: 565 - DNA, 969 bp, Homo sapiens
  ref <308>: DATABASE ACCESSION NUMBER: NCBI / NM_017828
  ref <309>: DATABASE ENTRY DATE: 2011-08-14
  ref <313>: RELEVANT RESIDUES IN SEQ ID NO: (1)..(969)
tcagctgaccctgcgggaccggaaaaagaaattcccgggccctggcttcttggcgcgatgaggttccggttctgtggtgatctggactgtcccgactgggtcctggcagaaatcagcacgctggccaagatgtcctctgtgaagttgcggctgctctgcagccaggtactaaaggagctgctgggacaggggattgattatgagaagatcctgaagctcacggctgacgccaagtttgagtcaggcgatgtgaaggccacagtggcagtgctgagtttcatcctctccagtgcggccaagcacagtgtcgatggcgaatccttgtccagtgaactgcagcagctggggctgcccaaagagcacgcggccagcctgtgccgctgttatgaggagaagcaaagccccttgcagaagcacttgcgggtctgcagcctacgcatgaataggttggcaggtgtgggctggcgggtggactacaccctgagctccagcctgctgcaatccgtggaagagcccatggtgcacctgcggctggaggtggcagctgccccagggaccccagcccagcctgttgccatgtccctctcagcagacaagttccaggtcctcctggcagaactgaagcaggcccagaccctgatgagctccctgggctgaggagaagggtgttccaggcctgtgtggagccgccctgcccgtatggagtcacgccctctgaactgctcttcgggaggcagccctggttctaggatgctgaggccctggcccggactctggcctcccagatccccagctgcctcacttctctcttgagaacttggctcagggctcctgaggacctttcccagcattaccttcccttcccttgaaaggcaattgttggctgttttcataagcaggaaaaataaacagaagtataaaggaaaaaaaaaaaaaaaaaaaaaaaaaaaaaaaaaaaaaaaaaaaaaa

SEQ ID NO: 566 - DNA, 3018 bp, Homo sapiens
  ref <308>: DATABASE ACCESSION NUMBER: NCBI / NM_020150
  ref <309>: DATABASE ENTRY DATE: 2011-11-27
  ref <313>: RELEVANT RESIDUES IN SEQ ID NO: (1)..(3018)
ggggaggggtgtgacgtacatccggcgagtagctggcggtcccgggtgctgctggttagtgtgctctgagggagggtccgagccagccgctgttttgccggaggagcccctcaggccgtagtaagcattaataatgtctttcatctttgagtggatctacaatggcttcagcagtgtgctccagttcctaggactgtacaagaaatctggaaaacttgtattcttaggtttggataatgcaggcaaaaccactcttcttcacatgctcaaagatgacagattgggccaacatgttccaacactacatccgacatcagaagagctaacaattgctggaatgacctttacaacttttgatcttggtgggcacgagcaagcacgtcgcgtttggaaaaattatctcccagcaattaatgggattgtctttctggtggactgtgcagatcattctcgcctcgtggaatccaaagttgagcttaatgctttaatgactgatgaaacaatatccaatgtgccaatccttatcttgggtaacaaaattgacagaacagatgcaatcagtgaagaaaaactccgtgagatatttgggctttatggacagaccacaggaaaggggaatgtgaccctgaaggagctgaatgctcgccccatggaagtgttcatgtgcagtgtgctcaagaggcaaggttacggcgagggtttccgctggctctcccagtatattgactgatgtttggacggtgaaaataaaagagttttacttctctggactgatcctattcacagcttcctcatgaacttttctaatagaacaaggaaagctctccaaccatgtctggcgttgagaagccaagagtctctgtcaactctctcattgcccagtggtgacatgtgctcttctccacactgttgggaggtaatgctgccccacgtgctggtgcaggtcagtatcctgggacttggaagctggcaggatttgccgggtaaagctgtatgccatcatggggcacctgaaaagaaaaacacgtctcaccactgtggttgattcaaaagaaagtgattctattttttaaagaaagcgttgttaatgtaattggtatccctcctaactttttgagttcacaatttacttggtccagagttttctattcttttttttttttaaactaatgaatgacatttagatacttcataaaattatgaacagatatggaggccagagctcatttgggtaaacttactcctgctgagttagcaggttggtgagagaagctcccctgagctcacctgtctctctgactgccttggagtaggtggcataaccttgtgcacagagaactagaaaaggggcagaaccccggccttgcagttgtggcaggtttccactgtggtaagctaggttcattcctcatcaaggaatgtgtagcagattgttcactgtggaggagttaattatagaatgggttattgttgttattcttactcatgaagttacagattttagccagtctttgcttttatacttttgtgaaatttaatttctctctatagcaccttcctttttcgttttcagttatcaaaagtgactttgacctcataaaagagttgagaacatctctcgtgtcacatactgcaggtgcatcagttacttttgcacagattctagggggacatttttctgaataggaagacaggacaaagttaacagcttaagggctcttaattctgtgagttgaggacttaaaagtattgtagcatttgtttggatccatgaaaaatgtattcagtgggctttaaaatttccatttgcagaatttggtctctcaggctgtttgggagctcttttttttacattttttctcctttgacacctattttattggtgtttaaagtaaaggttaacatctgtagcttttccaggtttttttttttttttttttttttttggtatgaaattgtctttctccattgcagaaataagctagggaaacactaacccaaaaactttctgtagagctgttcctttggaggcagcatcacttattggcagtaaagactcagtataaaagcaccggcatccctacttgggtgatggggattaattttatagcattccattttcctagtgccacatgtgaaattggattttgatgatcttaatctatattctacccttataataaaagatcaaaagatatatctcctatgaacagattggagataggagatgaaaagttgggaggatgtctttattctaatgtgagggtagggaaaatgtggataacattactggggtgagggaggcattgttctttagttggagttctcattcttattctccagtactgacttgtggggaaagcatactttttcactgccaggtactgaatgcagaggctcagtgaagtatatatgtgggaagtgcatgcatttcgtttattagcaaacatagctggattaagacaaagttgttggtttggaaaggggttaaagccttaagtgaacaaatctagctaacagtgaatgaactaggtaatataacttgcatatttttaatttcctttggttaaaggtcccccatacttctctgttcggagacatgagaagtatgattacttcagtgttagttttcttaattttttttttcccctatttgtcccttgtcactttgttgcaagctagaaatctgtgggttatacatagggcagctctttgtgaaagtggtttattccactggagaaaggggattgaaaatcagttagaaccaatgtatttcttgccccacggaacactattcctataagatagctgaaagaagctgctgtgaggagctcagctccaaacacaggatcagcaccttgtataggaattcccatgaattatgacttctcattctgttttatcagagtgcatatatgtcctacttcaggaaaagtaaaacagtcatttacgaaagaaagtcaatctgtatcctaagcattttaataaaaagttaaaacaaaaaaaaaaaaaaaaaaa

SEQ ID NO: 567 - DNA, 3952 bp, Homo sapiens
  ref <308>: DATABASE ACCESSION NUMBER: NCBI / NM_014610
  ref <309>: DATABASE ENTRY DATE: 2005-09-24
  ref <313>: RELEVANT RESIDUES IN SEQ ID NO: (1)..(3952)
aggtttggggtcaaggagcaaactctgcacaagatggcggcggtagcggcagtggcggcgcgtaggaggcggtcttgggcgtctttggtactggcttttttaggggtctgcctggggattacccttgctgtggatagaagcaactttaagacctgtgaagagagttctttctgcaagcgacagagaagcatacggccaggcctctctccataccgagccttgctggactctctacagcttggtcctgattccctcacggtccatctgatccatgaggtcaccaaggtgttgctggtgctagagcttcaggggcttcaaaagaacatgactcggttcaggattgatgagctggagcctcggcgaccccgataccgtgtaccagatgttttggtggctgatccaccaatagcccggctttctgtctctggtcgtgatgagaacagtgtggagttaaccatggctgagggaccctacaagatcatcttgacagcacggccattccgccttgacctactagaggaccgaagtcttttgcttagtgtcaatgcccgaggactcttggagtttgagcatcagagggcccctagggtctctttctcggataaggttaatctcacgcttggtagcatatgggataagatcaagaaccttttctctaggcaaggatcaaaagacccagctgagggcgatggggcccagcctgaggaaacacccagggatggcgacaagccagaggagactcaggggaaggcagagaaagatgagccaggagcctgggaggagacattcaaaactcactctgacagcaagccgtatggccccatgtctgtgggtttggacttctctctgccaggcatggagcatgtctatgggatccctgagcatgcagacaacctgaggctgaaggtcactgagggtggggagccatatcgcctctacaatttggatgtgttccagtatgagctgtacaacccaatggccttgtatgggtctgtgcctgtgctcctggcacacaaccctcatcgcgacttgggcatcttctggctcaatgctgcagagacctgggttgatatatcttccaacactgccgggaagaccctgtttgggaagatgatggactacctgcagggctctggggagaccccacagacagatgttcgctggatgtcagagactggcatcattgacgtcttcctgctgctggggccctccatctctgatgttttccggcaatatgctagtctcacaggaacccaggcgttgcccccactcttctccctcggctaccaccagagccgttggaactaccgggacgaggctgatgtgctggaagtggatcagggctttgatgatcacaacctgccctgtgatgtcatctggctagacattgaacatgctgatggcaagcggtatttcacctgggaccccagtcgcttccctcagccccgcaccatgcttgagcgcttggcttctaagaggcggaagctggtggccatcgtagacccccacatcaaggtggactccggctaccgagttcacgaggagctgcggaacctggggctgtatgttaaaacccgggatggctctgactatgagggctggtgctggccaggctcagctggttaccctgacttcactaatcccacgatgagggcctggtgggctaacatgttcagctatgacaattatgagggctcagctcccaacctctttgtctggaatgacatgaacgaaccatctgtgttcaatggtcctgaggtcaccatgctcaaggatgcccagcattatgggggctgggagcaccgggatgtgcataacatctatggcctttatgtgcacatggcgactgctgatgggctgagacagcgctctgggggcatggaacgcccctttgtcctggccagggccttcttcgctggctcccagcgctttggagccgtgtggacaggggacaacactgccgagtgggaccatttgaagatctctattcctatgtgtctcagcttggggctggtgggactttccttctgtggggcggatgtgggtggcttcttcaaaaacccagagccagagctgcttgtgcgctggtaccagatgggtgcttaccagccattcttccgggcacatgcccacttggacactgggcgacgagagccatggctgttaccatctcagcacaatgatataatccgagatgccttgggccagcgatattctttgctgcccttctggtacaccctcttatatcaggcccatcgggaaggcattcctgtcatgaggtgcagtaccctcaggatgtgactaccttcaatatagatgatcagtacttgcttggggatgcgttgctggttcaccctgtatcagactctggagcccatggtgtccaggtctatctgcctggccaaggggaggtgtggtatgacattcaaagctaccagaagcatcatggtccccagaccctgtacctgcctgtaactctaagcagtatccctgtgttccagcgtggagggacaatcgtgcctcgatggatgcgagtgcggcggtcttcagaatgtatgaaggatgaccccatcactctctttgttgcacttagccctcagggtacagctcaaggagagctctttctggatgatgggcacacgttcaactatcagactcgccaagagttcctgctgcgtcgattctcattctctggcaacacccttgtctccagctcagcagaccctgaaggacactttgagacaccaatctggattgagcgggtggtgataataggggctggaaagccagcagctgtggtactccagacaaaaggatctccagaaagccgcctgtccttccagcatgaccctgagacctctgtgttggtcctgcgcaagcctggcatcaatgtggcatctgattggagtattcacctgcgataacccaagggatgttctgggttagggggagggaaggggagcattagtgctgagagatattctttcttctgccttggagttcggccctccccagacttcacttatgctagtctaagacccagattctgccaacatttgggcaggatgagagggctgaccctgggctccaaattcctcttgtgatctcctcacctctcccactccattgataccaactctttcccttcattcccccaacatcctgttgctctaactggagcacattcacttacgaacaccaggaaaccacagggcccttgtcgccccttctctttcccttatttaggagccctgaactcccccagagtctatccattcatgcctcttgtatgttgatgccacttcttggaagaagatgagggcaatgagttagggctccttttccccttccctcccaccagattgctctcccacctttcatttcttcctccaggctttactcccctttttatgccccaccgatacactgggaccaccccttaccccggacaggatgaatggatcaaaggagtgaggttgctaaagaacatccttttccctctcattctacccttttcctctccccgattccttgtagagctgctgcaattcttagaggggcagttctacctcctctgtccctcggcagaaagacgtttccacacctcttaggggatgcgcattaaacttcttttgcccccttcttgtcccctttgaggggcacttaagatggagaaatcagttgtggtttcagtgaatcatggtcacctgtatttattgctaggagaagcctgagggtggggggagatgatcatgtgtgctcggggttggctggaagccctgggtggggggttgggggaggactaatggggagtcggggaatatttgtgggtattttttttacttcctcttggttcccagctgtgacacgttttgatcaaaggagaaacaataaagggataacccataaaaaccataaataaaaaaaaaaaaaaaaaaaaaaaaaaaaaaaa

SEQ ID NO: 568 - DNA, 2519 bp, Homo sapiens
  ref <308>: DATABASE ACCESSION NUMBER: NCBI / NM_014225
  ref <309>: DATABASE ENTRY DATE: 2011-12-04
  ref <313>: RELEVANT RESIDUES IN SEQ ID NO: (1)..(2519)
aatcttggtcgctaggacacggctaacttccgctttcttccccctctcctaggctcaaactagtcaaatcttgttcactcgaccaatggcaaatcggaagtgggcgggacttcacaagtccggaccaaagaaacgcgagcttagccctgggtagcgcggccaatggccgtggagcagcccctgtaaactggctcgggcgcccccacgcccgcccttccttcttctcccagcattgccccccccacgtttcagcacagcgctggccgcagtctgacaggaaagggacggagccaagatggcggcggccgacggcgacgactcgctgtaccccatcgcggtgctcatagacgaactccgcaatgaggacgttcagcttcgcctcaacagcatcaagaagctgtccaccatcgccttggcccttggggttgaaaggacccgaagtgagcttctgcctttccttacagataccatctatgatgaagatgaggtcctcctggccctggcagaacagctgggaaccttcactaccctggtgggaggcccagagtacgtgcactgcctgctgccaccgctggagtcgctggccacagtggaggagacagtggtgcgggacaaggcagtggagtccttacgggccatctcacacgagcactcgccctctgacctggaggcgcactttgtgccgctagtgaagcggctggcgggcggcgactggttcacctcccgcacctcggcctgcggcctcttctccgtctgctacccccgagtgtccagtgctgtgaaggcggaacttcgacagtacttccggaacctgtgctcagatgacacccccatggtgcggcgggccgcagcctccaagctgggggagtttgccaaggtgctggagctggacaacgtcaagagtgagatcatccccatgttctccaacctggcctctgacgagcaggactcggtgcggctgctggcggtggaggcgtgcgtgaacatcgcccagcttctgccccaggaggatctggaggccctggtgatgcccactctgcgccaggccgctgaagacaagtcctggcgcgtccgctacatggtggctgacaagttcacagagctccagaaagcagtggggcctgagatcaccaagacagacctggtccctgccttccagaacctgatgaaagactgtgaggccgaggtgagggccgcagcctcccacaaggtcaaagagttctgtgaaaacctctcagctgactgtcgggagaatgtgatcatgtcccagatcttgccctgcatcaaggagctggtgtccgatgccaaccaacatgtcaagtctgccctggcctcagtcatcatgggtctctctcccatcttgggcaaagacaacaccatcgagcacctcttgcccctcttcctggctcagctgaaggatgagtgccctgaggtacggctgaacatcatctctaacctggactgtgtgaacgaggtgattggcatccggcagctgtcccagtccctgctccctgccattgtggagctggctgaggacgccaagtggcgggtgcggctggccatcattgagtacatgcccctcctggctggacagctgggagtggagttctttgatgagaaacttaactccttgtgcatggcctggcttgtggatcatgtatatgccatccgcgaggcagccaccagcaacctgaagaagctagtggaaaagtttgggaaggagtgggcccatgccacaatcatccccaaggtcttggccatgtccggagaccccaactacctgcaccgcatgactacgctcttctgcatcaatgtgctgtctgaggtctgtgggcaggacatcaccaccaagcacatgctacccacggttctgcgcatggctggggacccggttgccaatgtccgcttcaatgtggccaagtctctgcagaagatagggcccatcctggacaacagcaccttgcagagtgaagtcaagcccatcctagagaagctgacccaggaccaggatgtggacgtcaaatactttgcccaggaggctctgactgttctgtctctcgcctgatgctggaagaggagcaaacactggcctctggtgtccaccctccaacccccacaagtccctctttggggagacactggggggcctttggctgtcactccctgtgcatggtctgaccccaggccccttcccccagcacggttcctcctctccccagcctgggaagatgtctcactgtccacctcccaacgggctaggggagcacggggttggacaggacagtgaccttgggaggaaggggctactccgcccacgtcagggagagatgtgagcatcccgggtcactggatcctgctgctgtaatgggaacccctcccccatttacttctccacctcccgtcctccccatcattggtttttttttgtgtgtcaactgtgccgtttttattttattccttttattttcccccttttcacagagaaataaaggtctagaagtagttggtcaaaaaaaaaa

SEQ ID NO: 569 - DNA, 1066 bp, Homo sapiens
  ref <308>: DATABASE ACCESSION NUMBER: NCBI / NM_006937
  ref <309>: DATABASE ENTRY DATE: 2011-12-18
  ref <313>: RELEVANT RESIDUES IN SEQ ID NO: (1)..(1066)
gcgcacgcagggtggggggagggagcgcacgacgtgcgcgcaccctctcccctcgtccaccgctgccgcctccttcttctgccgctcctggtgctgcttgtgtgctcgtttggtgcggacctggtacctcttttgtgaagcggcagctgaggagactccggcgctcgccatggccgacgaaaagcccaaggaaggagtcaagactgagaacaacgatcatattaatttgaaggtggcggggcaggatggttctgtggtgcagtttaagattaagaggcatacaccacttagtaaactaatgaaagcctattgtgaacgacagggattgtcaatgaggcagatcagattccgatttgacgggcaaccaatcaatgaaacagacacacctgcacagttggaaatggaggatgaagatacaattgatgtgttccaacagcagacgggaggtgtctactgaaaagggaacctgcttctttactccagaactctgttctttaaagaccaagattacattctcaattagaaaactgcaatttggttccaccacatcctgactactaccgtatagttttctctattctttcatttcccccttccccattcctttattgtacataaagtaactggtatatgtgcacaagcatattgcattttttttttttttaactaaacagccaatggtatgttttgattgacatcaagtggagacgggatggggaaaaatactgattctgtgaaaataccccctttctccattagtggcatgctcattcagctcttatctttatattccagtaagttattttgctctcactgttttaacaaaaaaaaaaaacaacaacataaaaatccttgcataccttgttcaattggagaattttaatgtttttcatttatcattgtaaaaccaaggacaattttataacttttttgtacgtagctgttacatgtagggcaatctgtctttaagtagggataaattactctaaaacaaaaaagaatcctagatagttttcccttcaagtcaagcgtcttgttgtttaaataaacttcttgtttaaaatga

SEQ ID NO: 570 - DNA, 2039 bp, Homo sapiens
  ref <308>: DATABASE ACCESSION NUMBER: NCBI / NM_005726
  ref <309>: DATABASE ENTRY DATE: 2011-09-25
  ref <313>: RELEVANT RESIDUES IN SEQ ID NO: (1)..(2039)
gtaggtttgttgcctcaccagtgcgcccgccggagggtgtttatcgcggctagagagatgtcgctgctgcggtcgctgcgcgtgtttctggtcgcgcggaccgggagctacccggctgggtctcttctgcgtcagtcgccccagccaaggcacacattttatgctgggccccgtctgtctgcctcggcctccagcaaggagctcctcatgaagctgcggcggaaaacaggctactcctttgtaaattgcaagaaagctctggagacttgtggcggggacctcaaacaggcagagatctggctccacaaggaggcccagaaggagggctggagcaaagctgccaagctccaagggaggaagaccaaagaaggcctgattgggctgttgcaggaaggaaacacaactgtattagtagaggtaaactgtgagacagattttgtttctagaaatttaaaatttcaactgttggtccagcaagtagcccttggaaccatgatgcattgtcagaccctaaaggatcaaccctctgcatacagtaaaggtttcttgaattcctctgagctttctggacttccagctgggcctgacagagaaggctcactcaaggatcagttggctttagcaattggaaaactgggagaaaacatgattcttaaacgagctgcatgggtgaaggtgccatctgggttctacgttggctcttatgtccacggagcaatgcagagtccctcacttcacaagctggtgctggggaagtatggggccctggtcatctgtgagacgtctgaacagaaaacaaaccttgaagacgttggccgccgccttgggcagcatgtggtgggcatggcccccctctctgttggctccctggacgatgagcctgggggagaggcagagactaagatgctgtcccagccgtatttgctggatccctccattaccttggggcagtatgtgcagcctcagggggtgtcggtagtagactttgtgcggtttgaatgtggagaaggtgaagaggcagcagaaactgaataggttccagagacttttggcccaggaggaatatttacttttagctctggacatcattacaaaaaggaatatttcccaaacctcttcagaccgagaatgcatgggtaaaattattaaatagttgtataataaaaataattttttccttgtttgcgtaatactggatttagcttttctgtgcctttcaaaaacaacaggtgggccttattgacgtgatagtgtcgtggagaacaggcatcaacaatactgctgctcccttcaacatagatttattatggtatttctgaaatttctaacttatatgttctgtcttacaccttttatgacatagaactcttttgttctgtttttgctttgcgacactgtgaaccgtgcttctgcctcggaacctccctagttatattacttgtgccacatggatttctttaggattattgattcaaacctagagttgtctggaaaatgtgggttctcttctttgtgattgtctgtagtatgctttgaaggtgctctgcagtggtagacacactggttctggcctcatttaatgaaattaataacacatgcccctatttctcttttggatgatgtgtgggtgggtgggtactgaggtttcctggccagctgtaaggcagattttgacattcttgtgccagaaacagaaattagagtagtccagttacccagagagctcacttaacattgcctctttacttccccagtactgaaacatttcttcaagtataacataaaattaccgtaacaagcagacccagaatactgaaaataactccatttgttcattataggtatctttatttgaaaagtgaaaaatgctttgacacattacagatctgggtatttggattttgcctatggagtgcatatatgatttcaatgatttacaggctaaatagattttagaaataatcatcttaaaattgaaaacaaaggtaggtcctggtataatattaaacataaagttattaaacattttaagcattgtt

SEQ ID NO: 571 - DNA, 3973 bp, Homo sapiens
  ref <308>: DATABASE ACCESSION NUMBER: NCBI / NM_005347
  ref <309>: DATABASE ENTRY DATE: 2011-12-25
  ref <313>: RELEVANT RESIDUES IN SEQ ID NO: (1)..(3973)
gggctgggggagggtatataagccgagtaggcgacggtgaggtcgacgccggccaagacagcacagacagattgacctattggggtgtttcgcgagtgtgagagggaagcgccgcggcctgtatttctagacctgcccttcgcctggttcgtggcgccttgtgaccccgggcccctgccgcctgcaagtcggaaattgcgctgtgctcctgtgctacggcctgtggctggactgcctgctgctgcccaactggctggcaagatgaagctctccctggtggccgcgatgctgctgctgctcagcgcggcgcgggccgaggaggaggacaagaaggaggacgtgggcacggtggtcggcatcgacctggggaccacctactcctgcgtcggcgtgttcaagaacggccgcgtggagatcatcgccaacgatcagggcaaccgcatcacgccgtcctatgtcgccttcactcctgaaggggaacgtctgattggcgatgccgccaagaaccagctcacctccaaccccgagaacacggtctttgacgccaagcggctcatcggccgcacgtggaatgacccgtctgtgcagcaggacatcaagttcttgccgttcaaggtggttgaaaagaaaactaaaccatacattcaagttgatattggaggtgggcaaacaaagacatttgctcctgaagaaatttctgccatggttctcactaaaatgaaagaaaccgctgaggcttatttgggaaagaaggttacccatgcagttgttactgtaccagcctattttaatgatgcccaacgccaagcaaccaaagacgctggaactattgctggcctaaatgttatgaggatcatcaacgagcctacggcagctgctattgcttatggcctggataagagggagggggagaagaacatcctggtgtttgacctgggtggcggaaccttcgatgtgtctcttctcaccattgacaatggtgtcttcgaagttgtggccactaatggagatactcatctgggtggagaagactttgaccagcgtgtcatggaacacttcatcaaactgtacaaaaagaagacgggcaaagatgtcaggaaagacaatagagctgtgcagaaactccggcgcgaggtagaaaaggccaaacgggccctgtcttctcagcatcaagcaagaattgaaattgagtccttctatgaaggagaagacttttctgagaccctgactcgggccaaatttgaagagctcaacatggatctgttccggtctactatgaagcccgtccagaaagtgttggaagattctgatttgaagaagtctgatattgatgaaattgttcttgttggtggctcgactcgaattccaaagattcagcaactggttaaagagttcttcaatggcaaggaaccatcccgtggcataaacccagatgaagctgtagcgtatggtgctgctgtccaggctggtgtgctctctggtgatcaagatacaggtgacctggtactgcttgatgtatgtccccttacacttggtattgaaactgtgggaggtgtcatgaccaaactgattccaaggaacacagtggtgcctaccaagaagtctcagatcttttctacagcttctgataatcaaccaactgttacaatcaaggtctatgaaggtgaaagacccctgacaaaagacaatcatcttctgggtacatttgatctgactggaattcctcctgctcctcgtggggtcccacagattgaagtcacctttgagatagatgtgaatggtattcttcgagtgacagctgaagacaagggtacagggaacaaaaataagatcacaatcaccaatgaccagaatcgcctgacacctgaagaaatcgaaaggatggttaatgatgctgagaagtttgctgaggaagacaaaaagctcaaggagcgcattgatactagaaatgagttggaaagctatgcctattctctaaagaatcagattggagataaagaaaagctgggaggtaaactttcctctgaagataaggagaccatggaaaaagctgtagaagaaaagattgaatggctggaaagccaccaagatgctgacattgaagacttcaaagctaagaagaaggaactggaagaaattgttcaaccaattatcagcaaactctatggaagtgcaggccctcccccaactggtgaagaggatacagcagaaaaagatgagttgtagacactgatctgctagtgctgtaatattgtaaatactggactcaggaacttttgttaggaaaaaattgaaagaacttaagtctcgaatgtaattggaatcttcacctcagagtggagttgaaactgctatagcctaagcggctgtttactgcttttcattagcagttgctcacatgtctttgggtgggggggagaagaagaattggccatcttaaaaagcgggtaaaaaacctgggttagggtgtgtgttcaccttcaaaatgttctatttaacaactgggtcatgtgcatctggtgtaggaagttttttctaccataagtgacaccaataaatgtttgttatttacactggtctaatgtttgtgagaagcttctaattagatcaattacttattttaggaaatttaagactagatactcgtgtgtggggtgaggggagggagtatttggtatgttgggataaggaaacacttctatttaatgcttccagggatttttttttttttttttaaccctcctgggcccaagtgatccttccacctcagtctcccagctaattgagaccacaggcttgttaccaccatgctcggcttttgcattaatctaagaaaaggggagagaagttaatccacatctttactcaggcaaggggcatttcacagtgcccaagagtggggttttcttgaacatacttggtttcctatttccccttatctttctaaaactgcctttctggtggctttttttaaaattattactaatgatgcttttatagctgcttggattctctgagaaatgatggggagtgagtgatcactggtattaactttatacacttggatttcatttgtaactttaggatgtaaaggtatattgtgaaccctagctgtgtcagaatctccatccctgaaatttctcattagtggtactggggtgggatcttggatggtgacattgaaactacactaaatcccctcactatgaatgggttgttaaaggcaatggtttgtgtcaaaactggtttaggattacttagattgtgttcctgaagaaaagagtccaggtaaatggtatgatcaataaaggacaggctggtgctaacataaaatccaatattgtaatcctagcactttgggaggccaaggcgggtggatcacaaggtcaagagatagagaccatctttgccaacatggtgaaactccatctctactgaaaatacaaaaattagctgggcgtggtagtgcaagctgaaggctgaggcaggagaatcactcgaacccgggaggcagaggttgcagtgagccgagatcacaccactgtactccagcccggcactccagcctggcgacaagagtgagactccacctcaaaaaaaaaaaaaagaatccaatactgcccaaggataggtattttatagatgggcaactggctgaaaggttaattctctagggctagtagaactggatcccaacaccaaactcttaattagacctaggcctcagctgcactgcccgaaaagcatttgggcagaccctgagcagaatactggtctcaggccaagcccaatacagccattaaagatgacctacagtgctgtgtaccctggggcaatagggttaaatggtagttagcaactagggctagtcttcccttacctcaaaggctctcactaccgtggaccacctagtctgtaactctttctgaggagctgttactgaatattaaaaagatagacttcaactatgaaa

SEQ ID NO: 572 - DNA, 1247 bp, Homo sapiens
  ref <308>: DATABASE ACCESSION NUMBER: NCBI / NM_014255
  ref <309>: DATABASE ENTRY DATE: 2011-12-24
  ref <313>: RELEVANT RESIDUES IN SEQ ID NO: (1)..(1247)
attgaaacctggactgctcgctggccggcagcgcaccgttttgaaggtcctagcccacctgggctggctcacgcgcacgactagccgctcccatacagcacgcccggactctgtcgtcgcttaaggccactcctattctacggctgacccctggtggtcacgtggatctgttcgccacgcaagtctgggtccttcggcgattgaccggggtccttgctgttcgggagcctctcctaagctgcctgttcgcgcgagagtttggaggggcgggtttggggtcggtgtctgattggggctcgcaccgcagcacgctggagtcccgcttaggtaccagttagcgtcaggggagctgggtcaggcggtcgccgggacaccccgtgtgtggcaggcggcgaagcgctctggagaatcccggacagccctgctccctgcagccaggtgtagtttcgggagccactggggccaaagtgagagtccagcggtcttccagcgcttgggccacggcggcggccctgggagcagaggtggagcgaccccattacgctaaagatgaaaggctggggttggctggccctgcttctgggggccctgctgggaaccgcctgggctcggaggagccaggatctccactgtggagcatgcagggctctggtggatgaactagaatgggaaattgcccaggtggaccccaagaagaccattcagatgggatctttccggatcaatccagatggcagccagtcagtggtggaggtgccttatgcccgctcagaggcccacctcacagagctgctggaggagatatgtgaccggatgaaggagtatggggaacagattgatccttccacccatcgcaagaactacgtacgtgtagtgggccggaatggagaatccagtgaactggacctacaaggcatccgaatcgactcagatattagcggcaccctcaagtttgcgtgtgagagcattgtggaggaatacgaggatgaactcattgaattcttttcccgagaggctgacaatgttaaagacaaactttgcagtaagcgaacagatctttgtgaccatgccctgcacatatcgcatgatgagctatgaaccactggagcagcccacactggcttgatggatcacccccaggaggggaaaatggtggcaatgccttttatatattatgtttttactgaaattaactgaaaaaatatgaaaccaaaagtacaaaaaaaaaaacaaaaaaaaaaaaaaaa

SEQ ID NO: 573 - DNA, 2126 bp, Homo sapiens
  ref <308>: DATABASE ACCESSION NUMBER: NCBI / NM_006815
  ref <309>: DATABASE ENTRY DATE: 2011-11-20
  ref <313>: RELEVANT RESIDUES IN SEQ ID NO: (1)..(2126)
gcggagcttaggcggcggtggctgagaaggcagcggggcggcggcggcggcggcggcggcggctgtggaggccgcagtccgggtcctggcttcggcctcagccccaccatggtgacgcttgctgaactgctggtgcttctggccgctctcctggccacggtctcgggctatttcgttagcatcgacgcccatgctgaagagtgcttctttgagcgggtcacctcgggcaccaagatgggcctcatcttcgaggtggcggagggcggcttcctggacatcgacgtggagattacaggaccagataacaaaggaatttacaaaggagacagagaatccagtgggaaatacacatttgctgctcacatggatggaacatacaaattttgttttagtaaccggatgtccaccatgactccaaaaatagtgatgttcaccattgatattggggaggctccaaaaggacaagatatggaaacagaagctcaccagaacaagctagaagaaatgatcaatgagctagcagtggcgatgacagctgtaaagcacgaacaggaatacatggaagtccgggagagaatacacagagccatcaacgacaacacaaacagcagagtggtcctttggtccttctttgaagctcttgttctagttgccatgacattgggacagatctactacctgaagagattttttgaagtccggagagttgtttaaaaagcctcttcctgatgatcccaactcagaattcactgtttaccaaacaccttggtcataataatgtcattagtttctccatttttattttctgaactgtacattcacaacttatgtttctttgagattaatagatattgggggaaaaacgcctttttaggaaaattatagtgaaaatttgacagttgattggcataatttcttgtttgaatgctgcctccattatataggtccttccaggaactcaaacactgtaagtgaaatatgggagtatagtttttattatttcttcttttccttttgttttcataatataatgcagtttgttcaggaaatcagcacaaagcctgatagtactttactaaaatgactgcattctttggattccttcagtctatggttcaagtcactaaagattcatttttgttgagtccttatgagaaacagcagtatgaatcttgacggtttctgcccgtcctaatggcagagctctctgacttgggtgtatgctgccaggctgggtactttcatactttgttttcttgttttgctttaaaactacgactcagcatacattttcccacatacatttttacattgtaccttaggactcagtcatctccacttaaattgatgacacaagcagctaataaccatttctgggtttctgcctaaccccctaattgtctgttaaagccaattctctgggtgtcccagtgagtggtggctttttttctttccacattggcacattcacttctcccactcttggcatgtaagaaataagcatttacataattggaaaaatctggatttctgatgccaaagggttaaagcttcttggatttcatttcattgatatacagccactattttatttttgatcagtggcctttgggccactgttcagggtactgaccatcagtgtcagcattagggttttggtttttgtttcttttgggtctttcttttttggcacatgtgaatcttgttttgtgtaaaatgaaattactttctcttgttctctgatgatgggtttaaaattaaaagagcatccggttttggtatggggatgatccaggattatgttgtgactgatacatattagttacttgtgcttttttttttttttttggatctttgcaagggcaaaactacaagtaacgagttttatataattaatttaaatttgttacaggttttcatgttcaggataaaccatacttccaccttgggtgagaacacttgcaacagtttattaatgaggtgactttcaccttaggacaactgttgcatgccaagttttttgtgtgtgtgaaacacttcaaaactgatttaaaagatgtaaatttaaaattggttgtatctaatatgccccaggttcggtaaataaacaattctttttaaaaaca

SEQ ID NO: 574 - DNA, 3234 bp, Homo sapiens
  ref <308>: DATABASE ACCESSION NUMBER: NCBI / NM_005456
  ref <309>: DATABASE ENTRY DATE: 2011-11-28
  ref <313>: RELEVANT RESIDUES IN SEQ ID NO: (1)..(3234)
ggggctgaaccaagcccagggccgcgggggccgtggcttcagcaccgcggagagcgccatctccgggggcggggctggcggggtgggggcggggcctgggcggggcgcgcgagaccccggccgggtcccgggggcgcgcgcggggcgctctcgccagtcccgcgggccgtgcgcggtgctgtgccgcgccctgccagacacaggtgcgcccgcctagcccgaactccgcggcggcggctgccctctcgccgcgcctccgcctccttcgcagccgccgcctcctccgcgccgcgctccgcccggatggccagggctgtgcccgagaatggcggagcgagaaagcggcggcctgggagggggggccgcgtccccgcccgccgcctccccgttcctggggctgcacatcgcttcgcctcccaatttcaggctcacccatgacatcagcctggaggagtttgaggatgaagacctctcggagatcactgatgagtgtggcatcagcttacagtgcaaagacaccctgtccttacggcccccgcgcgccgggctgctctctgcgggcggcggcggcgcggggagccggttgcaggccgagatgctgcagatggacctgatcgacgcgacgggggacactcccggggccgaggacgacgaggaggacgacgacgaggagcgcgcggcccggcggccgggagcggggccgcccaaggccgagtccggccaggagccggcgtcccgcggccagggccagagccaaggccagagccagggcccgggcagcggggacacgtaccggcccaagcggcccaccacgctcaacctctttccgcaggtgccgcggtctcaggacacactgaataataattctctgggcaaaaagcacagttggcaggatcgggtgtctcgatcatcctcacccctgaagacaggggagcagacaccaccgcatgaacacatctgcctgagcgatgagctgcccccccagagcggccccgcccccaccacagatcgaggcacctccaccgacagcccttgccgccgcagcacagccacccagatggcacctccgggtggtccccctgctgccccgcctgggggtcggggccactcgcatcgagaccgaatccactaccaggccgatgtgcgactagaggccactgaggagatctacctgaccccagtgcagaggcccccagacgctgcagagcccacctccgccttcctgccgcccactgagagccggatgtcagtcagctccgatccagaccctgccgcctacccctccacggcagggcggccgcacccctccatcagtgaagaggaagagggcttcgactgcctgtcgtccccagagcgggctgagcccccaggcggagggtggcgggggagcctgggggagccgccgccacctccacgggcctctctgagctcggacaccagcgccctgtcctatgactctgtcaagtacacgctggtggtagatgagcatgcacagctggagctggtgagcctgcggccgtgcttcggagactacagtgacgagagtgactctgccaccgtctatgacaactgtgcctccgtctcctcgccctatgagtcggccatcggagaggaatatgaggaggccccgcggccccagccccctgcctgcctctccgaggactccacgcctgatgaacccgacgtccatttctccaagaaattcctgaacgtcttcatgagtggccgctcccgctcctccagtgctgagtccttcgggctgttctcctgcatcatcaacggggaggagcaggagcagacccaccgggccatattcaggtttgtgcctcgacacgaagacgaacttgagctggaagtggatgaccctctgctagtggagctccaggctgaagactactggtacgaggcctacaacatgcgcactggtgcccggggtgtctttcctgcctattacgccatcgaggtcaccaaggagcccgagcacatggcagccctggccaaaaacagtgactgggtggaccagttccgggtgaagttcctgggctcagtccaggttccctatcacaagggcaatgacgtcctctgtgctgctatgcaaaagattgccaccacccgccggctcaccgtgcactttaacccgccctccagctgtgtcctggagatcagcgtgcggggtgtgaagataggcgtcaaggccgatgactcccaggaggccaaggggaataaatgtagccactttttccagttaaaaaacatctctttctgcggatatcatccaaagaacaacaagtactttgggttcatcaccaagcaccccgccgaccaccggtttgcctgccacgtctttgtgtctgaagactccaccaaagccctggcagagtccgtggggagagcattccagcagttctacaagcagtttgtggagtacacctgccccacagaagatatctacctggagtagctgtgcagccccgccctctgcgtcccccagccctcaggccagtgccaggacagctggctgctgacaggatgtggcactgcttgaggaggggcacctgccaccgccagaggacaaggaagtgggggccgctggcccagggtaggggagggtggggcaatggggagaggcaaatgcagtttattgtaatatatgggattagattcatctatggagggcagagtgggctgcctggggattgggagggacagggcttggggagcaggtctctggcagagaaggatgtccgttccaggagcacacggccctgccccatcctgggccttacctcccctgccagggctcgggcgctgtggctcctgccttgatgaagcccgtgtcctgccttgatgaagcctgtgccacctgcaagtgcccgccctgcccctgccccaacccccaccgaagagccctgagctcaggctgagcccagccacctcccaaggactttccagtgaggaaatggcaacacgtggaggtgaagtccctgttctcagctccgtcatctgcggggcttctgggtggctcctgccactgacctcaccggcatgctggcctgtggcaggcctaggacctcaggcggggaggaggagctgccgcaaggccctgtcccagcagaagagggaggcttcctgactgacacaggccagccccatcttggtcctgtcaccctggccccaactattaaagtgccatttcctgtctggaaaaaaaaaaaaaaaaaaaaaaaaaaaaaa

SEQ ID NO: 575 - DNA, 1681 bp, Homo sapiens
  ref <308>: DATABASE ACCESSION NUMBER: NCBI / NM_005273
  ref <309>: DATABASE ENTRY DATE: 2011-11-27
  ref <313>: RELEVANT RESIDUES IN SEQ ID NO: (1)..(1681)
actggcgggcgggatccctccgctctggggaggcagcgctggcggcggggctggggccactgaggaaatccatccgcgccgccgccgccgccgccgccgccgccgccgccgcctccgccgcggaggaagacagcgccgcccgcgcaccgccagcgacctccgccgcagagtcccaccgccacaggcctcgggccagcggccaggagctgcctcccccagcccccgtcccgcggcccccagccgcccccaaccctgccccacgggcccggcgccatgagtgagctggagcaactgagacaggaggccgagcagctccggaaccagatccgggatgcccgaaaagcatgtggggactcaacactgacccagatcacagctgggctggacccagtggggagaatccagatgaggacccggaggaccctccgtgggcacctggcaaagatctatgccatgcactgggggaccgactcaaggctgctggtcagcgcctcccaggatgggaagctcatcatctgggacagctacaccaccaacaaggtccacgccatcccgctgcgctcctcctgggtaatgacctgtgcctacgcgccctcagggaactttgtggcctgtggggggttggacaacatctgctccatctacagcctcaagacccgcgagggcaacgtcagggtcagccgggagctgcctggccacactgggtacctgtcgtgttgccgcttcctggatgacaaccaaatcatcaccagctctggggataccacctgtgccctgtgggacattgagacaggccagcagacagtgggttttgctggacacagtggggatgtgatgtccctgtccctggcccccgatggccgcacgtttgtgtcaggcgcctgtgatgcctctatcaagctgtgggacgtgcgggattccatgtgccgacagaccttcatcggccatgaatccgacatcaatgcagtggctttcttccccaacggctacgccttcaccaccggctctgacgacgccacgtgccgcctcttcgacctgcgggccgatcaggagctcctcatgtactcccatgacaacatcatctgtggcatcacctctgttgccttctcgcgcagcggacggctgctgctcgctggctacgacgacttcaactgcaacatctgggatgccatgaagggcgaccgtgcaggagtcctcgctggccacgacaaccgcgtgagctgcctcggggtcaccgacgatggcatggctgtggccacgggctcctgggactccttcctcaagatctggaactaatggccccacccccactgggcccaggccaggaggggccctgcccatgcccacactacaggccagggctgcggggctggcgcaatcccagcccccttccccgggccacggggccttgggtccctgccctcccacccaggtttggttcctcccggggcccccactgtggagataagaaggggatggaatgggggaagaggaggagcaggaggccctcatccttctgctgccctggggttggggcctcacccctctggagggccggaggcaggaggtggaaaccccaggggctggcttttttaaaactggttttattttaatttttattatattttcagtttttccataaaggagccaattccaactctgtaaaaaaaaaaaaaaaaaa

SEQ ID NO: 576 - DNA, 1648 bp, Homo sapiens
  ref <308>: DATABASE ACCESSION NUMBER: NCBI / NM_007260
  ref <309>: DATABASE ENTRY DATE: 2011-11-20
  ref <313>: RELEVANT RESIDUES IN SEQ ID NO: (1)..(1648)
ggaagttccggcgggggcggccgagggggaagagtgtgtctgcgggagaaagaggagaatcgcccaagcggcctcggaagtcccagggagtggaggcccccgccgtggagccgtgtggtgtatgtgtggtaacaccatgtctgtgcccctgctcaccgatgctgccaccgtgtctggagctgagcgggaaacggccgcggttatttttttacatggacttggagacacagggcacagctgggctgacgccctctccaccatccggctccctcacgtcaagtacatctgtccccatgcgcctaggatccctgtgaccctcaacatgaagatggtgatgccctcctggtttgacctgatggggctgagtccagatgccccagaggacgaggctggcatcaagaaggcagcagagaacatcaaggccttgattgagcatgaaatgaagaacgggatccctgccaatcgaatcgtcctgggaggcttttcacagggcggggccctgtccctctacacggccctcacctgcccccaccctctggctggcatcgtggcgttgagctgctggctgcctctgcaccgggccttcccccaggcagctaatggcagtgccaaggacctggccatactccagtgccatggggagctggaccccatggtgcccgtacggtttggggccctgacggctgagaagctccggtctgttgtcacacctgccagggtccagttcaagacatacccgggtgtcatgcacagctcctgtcctcaggagatggcagctgtgaaggaatttcttgagaagctgctgcctcctgtctaactagtcgctggccccagtgcagtaccccagctcatgggggactcagcaagcaagcgtggcaccatcttggatctgagccggtcgagcccctgtccccacccttcctgacctgtccttttcccacaggcctctgggggcaggtggcaaggcctggccgggccttccttcctggccttagccacctggctctgtctgcagcaggggcaggctgctttcttatccatttccctggaggcgggcccccctggcagcagtattggaggggctacaggcagctggagaaaggggcccagccgctgacccactcactcaggacctcactcactagccccgctttgggccccctcctgtgacctcagggtttggcccatggggcccccccaggcccctgccccaactgattctgcccagataatcgtgtctcctgcctccactcagctgcttctcagtcatgaatgtggccatggccccggggtccccttgctgctgtgggctccctgtccctgggcaggagtgctggtgaggaggtggagccttttgaggggggccttccctcagctgtttccccacactggggggctgggccctgcctccccgttaccctccttccctgcaggcctggagcctgtagggctggactgaggttcaggtctccccccagctgtctcacccccactttgtccccactctagagcagggaggcagtgggggaggagttgtgtctcgtcttctgtctccatgtggtttttgggtgtttttcttgttgtgtcctggattccgataaaattaaagaaattgcttcctcaaaaaaaaaaaaaaaaaaaaaaaaaa

SEQ ID NO: 577 - DNA, 1631 bp, Homo sapiens
  ref <308>: DATABASE ACCESSION NUMBER: NCBI / NM_007103
  ref <309>: DATABASE ENTRY DATE: 2011-11-26
  ref <313>: RELEVANT RESIDUES IN SEQ ID NO: (1)..(1631)
gaagttgaaggggcgcagcgataccggtgcgcggcgctggcgtcgggcgcgtgacgtctttcctgcgcgccacctagcgtctctatcgcgccagttcctcagcctcagtgctatgaaggtgacagcgtgaggtgacccatctggcccgccgcgatgctggcaacacggcggctgctcggctggtcgcttcccgcgcgggtatctgtgcgtttcagcggcgacacgacagcacccaagaaaacctcatttggctcgctgaaggatgaagaccggattttcaccaacctgtacggccgccatgactggaggctgaaaggttccctgagtcgaggtgactggtacaagacaaaggagatcctgctgaaggggcccgactggatcctgggcgagatcaagacatcgggtttgaggggccgtggaggcgctggcttccccactggcctcaagtggagcttcatgaataagccctcagatggcaggcccaagtatctggtggtgaacgcagacgagggggagccgggcacctgcaaggaccgggagatcttacgccatgatcctcacaagctgctggaaggctgcctggtggggggccgggccatgggcgcccgcgctgcctatatctacatccgaggggaattctacaatgaggcctccaatctgcaggtggccatccgagaggcctatgaggcaggtctgattggcaagaatgcttgtggctctggctatgattttgacgtgtttgtggtgcgcggggctggggcctacatctgtggagaggagacagcgctcatcgagtccattgagggcaagcagggcaagccccgcctgaagccccccttccccgcagacgtgggagtgtttggctgccccacaactgtggccaacgtggagacagtggcagtgtcccccacaatctgccgccgtggaggtacctggtttgctggctttggcagagaacgcaactcaggcaccaaactattcaacatctctggccatgtcaaccacccttgcactgtggaggaggagatgtctgtgcccttgaaagaactgattgagaagcatgctgggggtgtcacgggcggctgggacaacctccttgctgtgatccctggcggctcgtctaccccactgatccccaagtctgtgtgtgagacggtgctgatggacttcgatgcgctggtgcaggcacagacaggcctgggcacagctgcggtgatcgtcatggaccgctcgacggacatcgtgaaagccatcgcccgcctcattgagttctataagcacgagagctgtggccagtgtaccccatgccgtgagggtgtggactggatgaacaaggtgatggcacgtttcgtgaggggggatgcccggccggccgagatcgactccctgtgggagatcagcaagcagatagaaggccatacgatttgtgctctgggtgacggggccgcctggcctgtgcagggtctgatccgccactttcggccggagctcgaggagcggatgcagcggtttgcccagcagcatcaggcccggcaggctgcctcttagcccaccaccctggcctgctgtcctgcgtctatccatgtggaatgctggacaataaagcgagtgctgcccaccctccagctgcc

SEQ ID NO: 578 - DNA, 2656 bp, Homo sapiens
  ref <308>: DATABASE ACCESSION NUMBER: NCBI / NM_017797
  ref <309>: DATABASE ENTRY DATE: 2011-11-20
  ref <313>: RELEVANT RESIDUES IN SEQ ID NO: (1)..(2656)
atggcggcgggtgggagcggcgggcgtgcgtcgtgcccgccgggggtcggggtcggcccgggcacggggggcagtcccgggcccagcgccaacgccgccgccaccccggcccccggcaacgcggccgccgccgccgccgccgccgccgccgccgccgccgcccctgggccgacgccgcccgccccgccgggccccgggacagacgcgcaggccgcgggcgcggagcgggcggaggaggcggcgggcccgggggcggcggcgctgcagcgcgaggccgcgtacaactggcaggccagcaagcccaccgtgcaggagcgcttcgccttcctcttcaacaacgaggtgctgtgcgacgtgcacttcctggtgggcaaggggctcagctcgcagcgcatccccgcgcacaggttcgtgctggccgtgggcagcgccgtctttgatgccatgttcaacgggggaatggccacaacatccacggagattgagctgcccgacgtggaacccgctgccttcctcgcactgctcaagtttctctactcggacgaggtgcagattggcccggagacggtgatgaccacgctatacaccgccaagaagtacgcggtgccagcgctcgaggcccattgcgtggagttcctgaagaagaacctgcgagccgacaacgccttcatgctgctcacgcaggcgcgactcttcgatgaaccgcagctggccagcctgtgcctggagaacatcgacaaaaacactgcagacgccatcaccgcggagggcttcaccgacattgacctggacacgctggtggctgtcctggagcgcgacacactgggcatccgtgaggtgcggctgttcaatgccgttgtccgctggtccgaggccgagtgtcagcggcagcagctgcaggtgacgccagagaacaggcggaaggttctgggcaaggccctgggcctcattcgcttcccgctcatgaccatcgaggagttcgctgcaggtcccgcacagtcgggcatcctggtggaccgcgaggtggtcagcctcttcctgcacttcaccgtcaaccccaagccacgagtggagttcattgaccggccccgctgctgcctgcgtgggaaggagtgcagcatcaaccgcttccagcaggtggagagtcgctggggctacagcgggaccagtgaccgcatcaggttctcagtcaacaagcgcatcttcgtggtgggatttgggctgtatggatccatccacgggcccaccgactaccaagtgaacatccagattattcacaccgatagcaacaccgtcttgggccagaacgacacgggcttcagctgcgacggctcagccagcaccttccgcgtcatgttcaaggagccggtggaggtgctgcccaacgtcaactacacggcctgtgccacgctcaagggcccagactcccactacggcaccaaaggcctgcgcaaggtgacacacgagtcgcccaccacgggcgccaagacctgcttcaccttttgctacgcggccgggaacaacaatggcacatccgtggaggacggccagatccccgaggtcatcttctacacctaggctgcccgacaccgacaccgccctccctccgtggggatagccgcagccccaggccatcatctgctgctggggcccccccaccacgcggtgccaggcccagtgtcccccaggccgtctgtccactccatgccacctttctcagcatcaggacggggttgccctgtgttcaccacgagtgtggctgctggatcagggcagccggggaggtggccaggccagtggccaggccctgtggagacaatccctcaggactagggacagggctgtgccggcctgggccagggcccacggacccgcagctcagggcgcctgcccacgtcgtctgccggcggtgcgccgcgggcgtccctcgcgtctcttcactgcacattgcaatgcatttgcgattcccatttctctgctaggagccagcctgggtggcgctgctcccagagccgtgggtcccagaccttgcgttccttttgttcctgtccgtttatcaggacacgggccccacctgtcacgtgcccgaggccacccaagcccagcctgcggggcgttcccactgcctggatgccggcttgagttctgcgcacgcaggattcagtgtggggacggcccctgccggataggcctagccctggcccaggtggtgagcggtttgcagtgtccgttctcatccacctgatgggcccagataaaggcccccgctgtccagcctccctggacggccctcgcggtccctgcagcccaagatgggactcagaccctgtgccccagagctcccctgccgcagaatggggccccagccggccccgaccgggtccaggagcactgctcgcctgtacatactgttgccctagcccacctggtgccgtgggagccacccccaggtgctgggggcacagcccctccccactccggccacgcccccacccaccccgcgtgtttctgccctgtgactcctggaacctgcgtcctccccaaagccatgggaggggtgtcctcctcagaccatgcccccagatgatttttttaaataaagaaacaaatgcacctgcaaaaaaaaaaaaaaaaaaaaaaaaaaaaaaaaaaaaaa

SEQ ID NO: 579 - DNA, 2625 bp, Homo sapiens
  ref <308>: DATABASE ACCESSION NUMBER: NCBI / NM_016237
  ref <309>: DATABASE ENTRY DATE: 2011-11-27
  ref <313>: RELEVANT RESIDUES IN SEQ ID NO: (1)..(2625)
gcggatgtctgtttcctgggatattgtgagggcgggcggagatgtagacccggtagtgttgtgccttgtggtgacaactggcggcagcgcgccgcgggcccgagacttagtctcgggccgccatggccagcgtccacgagagcctctacttcaatcccatgatgaccaatggggttgtgcacgccaatgtgttcggcatcaaggactgggtgacgccgtacaagatcgcggtgctggtgctgctgaacgagatgagccgcacaggcgagggcgccgtcagcctcatggagcggcggaggctcaaccagctgctcctgcccctgctgcagggcccagatattacactgtcaaaactttacaagttaattgaagagtcttgtccacagctggcaaattcagtgcagatcagaatcaaactgatggctgaaggcgagttgaaggatatggaacagttttttgatgacctttcagattctttctctggaactgaaccagaggttcacaaaacaagtgtagtaggtttgtttctgcgtcacatgatcttggcctacagtaagctttctttcagccaagtgtttaaactgtacactgcccttcagcagtacttccagaatggtgagaaaaagacagtggaggatgctgatatggaactgaccagtagagatgagggtgaaagaaaaatggaaaaagaagaacttgatgtatctgtaagagaagaggaggtatcttgcagtgggcctctgtcccaaaaacaagcagaattttttctttctcaacaggcttctttgctaaagaatgatgagactaaggccctcactccagcttccttgcagaaggaattaaacaatttgttgaaatttaatcctgattttgctgaagcgcattatctcagctacttaaacaacctccgtgtccaagatgttttcagttcaacacacagtctcctccattattttgatcgtctgattcttaccggagccgaaagcaaaagtaatggggaagagggctatggccggagcttgagatacgccgctctgaatcttgccgccctgcactgccgcttcggtcactatcaacaggcagagctcgccctgcaggaggcaattaggattgcccaggagtccaacgatcacgtgtgtctccagcactgtttgagctggctttatgtgctggggcagaagagatccgatagctatgttctgctggagcattctgtgaagaaggcagtacattttgggttaccgtacctcgcctccctgggaatacagtcccttgttcaacagagagcttttgctgggaagacggcaaacaagctgatggatgccctaaaggactccgacctcctgcactggaaacacagcctgtcagagctcatcgatatcagcatcgcacagaaaacggccatctggaggctgtatggccgcagcaccatggcactgcaacaggcccagatgttgctgagcatgaacagcctggaggcggtgaatgcgggcgtgcagcagaacaacacagagtcctttgctgtcgcactctgccacctcgcagagctacacgcggagcagggctgttttgctgcagcttctgaagtgttaaagcacttgaaggaacgatttccgcctaatagtcagcacgcccagttatggatgctatgtgatcaaaaaatacagtttgacagagcaatgaatgatggcaaatatcatttggctgattcacttgttacaggaatcacagctctcaatagcatagagggtgtttataggaaagcggttgtattacaagctcagaaccaaatgtcagaggcacataagcttttacaaaaattgttggttcattgtcagaaactgaagaacacagaaatggtgatcagtgtcctactgtccgtggcagagctgtactggcgatcttcctcccctaccatcgcgctgcccatgctcctgcaggctctggccctctccaaggagtaccggttacagtacttggcctctgaaacagtgctgaacttggcttttgcgcagctcattcttggaatcccagaacaggccttaagtcttctccacatggccatcgagcccatcttggctgacggggctatcctggacaaaggtcgtgccatgttcttagtggccaagtgccaggtggcttcagcagcttcctacgatcagccgaagaaagcagaagctctggaggctgccatcgagaacctcaatgaagccaagaactattttgcaaaggttgactgcaaagagcgcatcagggacgtcgtttacttccaggccagactctaccataccctggggaagacccaggagaggaaccggtgtgcgatgctcttccggcagctgcatcaggagctgccctctcatggggtacccttgataaaccatctctagagaggacatccctgctgggctgctgtgcagagtataagattttggacttgttcatgtcccctctctccctataaatgatgtatttgtgacaccctatcttgtcaataaacagcattctgattagtttgtcttattttgttgctagtaactacgtatttgttttattccccttttcttcccttttggtagcaaaggacaccaactttttcttaataaatgggtattttgctaacaa

SEQ ID NO: 580 - DNA, 1326 bp, Homo sapiens
  ref <308>: DATABASE ACCESSION NUMBER: NCBI / NM_005801
  ref <309>: DATABASE ENTRY DATE: 2011-09-25
  ref <313>: RELEVANT RESIDUES IN SEQ ID NO: (1)..(1326)
ccgcccctctgccccagtcactgagccgccgccgaggattcagcagcctcccccttgagccccctcgcttcccgacgttccgttcccccctgcccgccttctcccgccaccgccgccgccgccttccgcaggccgtttccaccgaggaaaaggaatcgtatcgtatgtccgctatccagaacctccactctttcgacccctttgctgatgcaagtaagggtgatgacctgcttcctgctggcactgaggattatatccatataagaattcaacagagaaacggcaggaagacccttactactgtccaagggatcgctgatgattacgataaaaagaaactagtgaaggcgtttaagaaaaagtttgcctgcaatggtactgtaattgagcatccggaatatggagaagtaattcagctacagggtgaccaacgcaagaacatatgccagttcctcgtagagattggactggctaaggacgatcagctgaaggttcatgggttttaagtgcttgtggctcactgaagcttaagtgaggatttccttgcaatgagtagaatttcccttctctcccttgtcacaggtttaaaaacctcacagcttgtataatgtaaccatttggggtccgcttttaacttggactagtgtaactccttcatgcaataaactgaaaagagccatgctgtctagtcttgaagtccctcatttaaacagaggtcaagcaataggcgcctggcagtgtcaagcctgaaaccaagcaataccgtcatgtttcagccaagcccagagccctaagattacaaacaactatggccggaacctcctcagctctccctctgcagagttccctaccctaagagaatgttaccacctgaacagtcctcggtgaatctgagaggagaggatggggtaaggcagaagcaccagctgtactactagaagggagcttttggtggtagatcccctggtgtctccaacctgactaggtggacagagctcaaagaggccctcttaccgctagcgaggtgataggacatctggcttgccacaaaggtctgttcgaccagacatatcctagctaagggatgtccaaacatcagaatgtgaggccaaccttctatcagagttaaacttttgacaagggaacaaatctcaaactgatccatcagtcatgtagctagctgtagagcttgcaacttaatagcagcagctgcccaatgccatgtgaagtaacaaactggtttttggtttttttttccccttcagttttaatgttatgtgtaatgtatttaaacccttatttaaataaaacttgttttcagaaata

SEQ ID NO: 581 - DNA, 2144 bp, Homo sapiens
  ref <308>: DATABASE ACCESSION NUMBER: NCBI / NM_005216
  ref <309>: DATABASE ENTRY DATE: 2011-12-18
  ref <313>: RELEVANT RESIDUES IN SEQ ID NO: (1)..(2144)
aatccacctcccaccagggcacttccggcggcgctctccgcgccttatcgccaaagctgcggctctggacgcccagccgcggcgtatcccgatcacttccgggtagtgctccacgggcacgagccgcgattgggctaccgtagatggggtacttccggtgtgcaggtgctgggtccttcggcaggaggaggaagatggagcccagcaccgcggcccgggcttgggccctcttttggttgctgctgcccttgcttggcgcggtttgcgccagcggaccccgcaccttagtgctgctggacaacctcaacgtgcgggagactcattcgcttttcttccggagcctgaaggaccggggctttgagctcacattcaagaccgctgatgaccccagcctgtctctcataaagtatggggaattcctctatgacaatctcatcattttctccccttcggtagaagattttggaggcaacatcaacgtggagaccatcagtgcctttattgacggcggaggcagtgtgctggtagctgccagctccgacattggtgaccctcttcgagagctgggcagtgagtgcgggattgagtttgacgaggagaaaacggctgtcattgaccatcacaactatgacatctcagaccttggccagcatacgctcatcgtggctgacactgagaacctgctgaaggccccaaccatcgttgggaaatcatctctaaatcccatcctctttcgaggtgttgggatggtggccgatcctgataaccctttggtgctggacatcctgacgggctcttccacctcttactccttcttcccggacaagcctatcacccagtatccacatgcggtggggaagaacaccctcctcattgctgggctccaggccaggaacaatgcccgcgtcatcttcagcggctccctcgacttcttcagcgactccttcttcaactcagcagtgcagaaggcggcgcccggctcccagaggtattcccagacaggcaactatgaactagctgtggccctctcccgctgggtgttcaaggaggagggtgtcctccgtgtggggcctgtgtcccatcatcgggtgggcgagacagccccacccaatgcctacactgtcactgacctagtggagtatagcatcgtgatccagcagctctcaaatggcaaatgggtcccctttgatggcgatgacattcagctggagtttgtccgcattgatccttttgtgaggaccttcctgaagaagaaaggtggcaaatacagtgttcagttcaagttgcccgacgtgtatggtgtattccagtttaaagtggattacaaccggctaggctacacacacctgtactcttccactcaggtatccgtgcggccactccagcacacgcagtatgagcgcttcatcccctcggcctacccctactacgccagcgccttctccatgatgctggggctcttcatcttcagcatcgtcttcttgcacatgaaggagaaggagaagtccgactgaggggctagagccctctccgcacagcgtggagacggggcaaggaggggggttattaggattggtggttttgttttgctttgtttaaagccgtgggaaaatggcacaactttacctctgtgggagatgcaacactgagagccaaggggtgggagttgggataatttttatataaaagaagtttttccactttgaattgctaaaagtggcatttttcctatgtgcagtcactcctctcatttctaaaatagggacgtggccaggcacggtggctcatgcctgtaatcccagcactttgggaggccgaggcaggcggctcacgaggtcaggagatcgagactatcctggctaacacggtaaaaccctgtctctactaaaagtacaaaaaattagctgggcgtggtggtgggcacctgtagtcccagctactcgggaggctgaggcaggagaaaggcatgaatccaagaggcagagcttgcagtgagctgagatcacgccattgcactccagcctgggcaacagtgttaagactctgtctcaaatataaataaataaataaataaataaataaataaataaaaataaagcgagatgttgccctcaaacttcacctggaaaaaaaaaaaaaaaaaa

SEQ ID NO: 582 - DNA, 3617 bp, Homo sapiens
  ref <308>: DATABASE ACCESSION NUMBER: NCBI / NM_016457
  ref <309>: DATABASE ENTRY DATE: 2011-12-18
  ref <313>: RELEVANT RESIDUES IN SEQ ID NO: (1)..(3617)
actgtcgctccggacacttcctcctgggccgccgccgccgccgccgacttaaactttggagggggaaaaagagctactggcgcctggcgaccctccctgccccccacccaaccccgctccggcaacgcccccttcctcacggctcccgaccgaacttttctccaacttctgcgactcgtgagattcccttctacccactccggccctcgggacccctctgcccatcccctggccggtcgggtccctgcgaacccctttatctctggaatccactcggtccccgactcagagactcctgccctccacccccaaggtgaattcccccgggccgccttctgagtgggatcctcttcttggagcactggatcctgggattccctctgcccccttctcaatccctcctctagggaaggggcctttgaatcgcgggctctcctgatccctgtgaccccgacctactagatttcctctcaggcttcttggaatctcaatcgctgggacctccaacccactacttttctcctttctgatcttctgggagccctggattccgggcctctgacccactatagtgcctttctctccttcccaggaccccgccatcctcaggtcccctccgcctgccagatcttttctcggatccccgctctcccaccacctgctcacgagatcccgcggatctagaacccagggtcccccggggccccccggccgggtcccgggtgggctccaggcggccggtccccggcctccccccatggccaccgccccctcttatcccgccgggctccctggctctcccgggccggggtctcctccgccccccggcggcctagagctgcagtcgccgccaccgctactgccccagatcccggccccgggttccggggtctcctttcacatccagatcgggctgacccgcgagttcgtgctgttgcccgccgcctccgagctggctcatgtgaagcagctggcctgttccatcgtggaccagaagttccctgagtgtggcttctacggcctttacgacaagatcctgcttttcaaacatgaccccacgtcggccaacctcctgcagctggtgcgctcgtccggagacatccaggagggcgacctggtggaggtggtgctgtcggcctcggccaccttcgaggacttccagatccgcccgcacgccctcacggtgcactcctatcgggcgcctgccttctgtgatcactgcggggagatgctcttcggcctagtgcgccagggcctcaagtgcgatggctgcgggctgaactaccacaagcgctgtgccttcagcatccccaacaactgtagtggggcccgcaaacggcgcctgtcatccacgtctctggccagtggccactcggtgcgcctcggcacctccgagtccctgccctgcacggctgaagagctgagccgtagcaccaccgaactcctgcctcgccgtcccccgtcatcctcttcctcctcttctgcctcatcgtatacgggccgccccattgagctggacaagatgctgctctccaaggtcaaggtgccgcacaccttcctcatccacagctatacacggcccaccgtttgccaggcttgcaagaaactcctcaagggcctcttccggcagggcctgcaatgcaaagactgcaagtttaactgtcacaaacgctgcgccacccgcgtccctaatgactgcctgggggaggcccttatcaatggagatgtgccgatggaggaggccaccgatttcagcgaggctgacaagagcgccctcatggatgagtcagaggactccggtgtcatccctggctcccactcagagaatgcgctccacgccagtgaggaggaggaaggcgagggaggcaaggcccagagctccctggggtacatccccctaatgagggtggtgcaatcggtgcgacacacgacgcggaaatccagcaccacgctgcgggagggttgggtggttcattacagcaacaaggacacgctgagaaagcggcactattggcgcctggactgcaagtgtatcacgctcttccagaacaacacgaccaacagatactataaggaaattccgctgtcagaaatcctcacggtggagtccgcccagaacttcagccttgtgccgccgggcaccaacccacactgctttgagatcgtcactgccaatgccacctacttcgtgggcgagatgcctggcgggactccgggtgggccaagtgggcagggggctgaggccgcccggggctgggagacagccatccgccaggccctgatgcccgtcatccttcaggacgcacccagcgccccaggccacgcgccccacagacaagcttctctgagcatctctgtgtccaacagtcagatccaagagaatgtggacattgccactgtctaccagatcttccctgacgaagtgctgggctcagggcagtttggagtggtctatggaggaaaacaccggaagacaggccgggacgtggcagttaaggtcattgacaaactgcgcttccctaccaagcaggagagccagctccggaatgaagtggccattctgcagagcctgcggcatcccgggatcgtgaacctggagtgcatgttcgagacgcctgagaaagtgtttgtggtgatggagaagctgcatggggacatgttggagatgatcctgtccagtgagaagggccggctgcctgagcgcctcaccaagttcctcatcacccagatcctggtggctttgagacaccttcacttcaagaacattgtccactgtgacttgaaaccagaaaacgtgttgctggcatcagcagacccatttcctcaggtgaagctgtgtgactttggctttgctcgcatcatcggcgagaagtcgttccgccgctcagtggtgggcacgccggcctacctggcacccgaggtgctgctcaaccagggctacaaccgctcgctggacatgtggtcagtgggcgtgatcatgtacgtcagcctcagcggcaccttccctttcaacgaggatgaggacatcaatgaccagatccagaacgccgccttcatgtacccggccagcccctggagccacatctcagctggagccattgacctcatcaacaacctgctgcaggtgaagatgcgcaaacgctacagcgtggacaaatctctcagccacccctggttacaggagtaccagacgtggctggacctccgagagctggaggggaagatgggagagcgatacatcacgcatgagagtgacgacgcgcgctgggagcagtttgcagcagagcatccgctgcctgggtctgggctgcccacggacagggatctcggtggggcctgtccaccacaggaccacgacatgcaggggctggcggagcgcatcagtgttctctgaggtcctgtgccctcgtccagctgctgccctccacagcggttcttcacaggatcccagcaatgaactgttctagggaaagtggcttcctgcccaaactggatgggacacgtggggagtggggtggggggagctatttccaaggcccctccctgtttccccagcaattaaaacggactcatctctggccccatggccttgatctcagcaaaaaaaaaaaaaaaaa

SEQ ID NO: 583 - DNA, 1022 bp, Homo sapiens
  ref <308>: DATABASE ACCESSION NUMBER: NCBI / NM_006442
  ref <309>: DATABASE ENTRY DATE: 2011-12-24
  ref <313>: RELEVANT RESIDUES IN SEQ ID NO: (1)..(1022)
gggcgggagcggcggtccagactggggagggacgcgcaccggccaggaggcttcaagaggagggcactagggccctgcgagcggcgtcttaaccggcggcgctaggactccgcgggaaacggcgggggcggagcgggcggcaccaggacccaggggaaccgcgacgggcgggcggcgagcaggcccgggagccgggaggctgcgggcggcggcgctggacccgacgcggcgagagaggccccgagatgccgagcaagaagaagaagtacaacgcgcggttcccgccggcgcggatcaagaagatcatgcagacggacgaagagattgggaaggtggcggcggcggtgcctgtcatcatctcccgggcgctcgagctcttcctagagtcgctgttgaagaaggcctgccaggtgacccagtcgcggaacgcgaagaccatgaccacatcccacctgaagcagtgcatcgagctggagcagcagtttgacttcttgaaggacctggtggcatctgttcccgacatgcagggggacggggaagacaaccacatggatggggacaagggcgcccgcaggggccggaagccaggcagcggcggccggaagaacggtgggatgggaacgaaaagcaaggacaagaagctgtccgggacagactcggagcaggaggatgaatctgaggacacagatactgatggggaagaggagacatcacaacccccaccccaggccagccacccctctgcccactttcagagccccccgacacccttcctgcccttcgcctctactctgcctttgcccccagcgcccccgggcccctcagcacctgatgaagaggacgaagaagattacgactcctagcgccttctgccccccagaccatagccccttttagttggttttagttgctctggggggaggagagaaggtagagctgttcttaaatttattaaaaaaaaaaataaaagggaatctcagtgtctgttccaggctctgcgcaggaaaaaaaaaaaaaaaaaa

SEQ ID NO: 584 - DNA, 827 bp, Homo sapiens
  ref <308>: DATABASE ACCESSION NUMBER: NCBI / NM_021019
  ref <309>: DATABASE ENTRY DATE: 2011-11-28
  ref <313>: RELEVANT RESIDUES IN SEQ ID NO: (1)..(827)
tcgtctgcataaacccaggccacggttcctattggctgagtcctctgagggtgacgtcatcgggacgtactaagactagggttgggccgagagtcggagccattactgcaggaaaaggtcccggagagctgagcagtcaagatgtgtgacttcaccgaagaccagaccgcagagttcaaggaggccttccagctgtttgaccgaacaggtgatggcaagatcctgtacagccagtgtggggatgtgatgagggccctgggccagaaccctaccaacgccgaggtgctcaaggtcctggggaaccccaagagtgatgagatgaatgtgaaggtgctggactttgagcactttctgcccatgctgcagacagtggccaagaacaaggaccagggcacctatgaggattatgtcgaaggacttcgggtgtttgacaaggaaggaaatggcaccgtcatgggtgctgaaatccggcatgttcttgtcacactgggtgagaagatgacagaggaagaagtagagatgctggtggcagggcatgaggacagcaatggttgtatcaactatgaagcgtttgtgaggcatatcctgtcggggtgacgggcccatggggcggagctcgtccgcatggtgctgaatggctgaggaccttcccagtctccccagagtccgtgcctttccctgtgtgaattttgtatctagcctaaagtttccctaggctttcttgtctcagcaactttcccatcttgtctctcttggatgatgtttgccgtcagcattcaccaaataaacttgctctctgggccctcggtaaaaaaaaaaaaaaaaaa

SEQ ID NO: 585 - DNA, 2740 bp, Homo sapiens
  ref <308>: DATABASE ACCESSION NUMBER: NCBI / NM_005112
  ref <309>: DATABASE ENTRY DATE: 2011-08-14
  ref <313>: RELEVANT RESIDUES IN SEQ ID NO: (1)..(2740)
ccgcagccgccgagccgagcgcttgactatatatggtcaaagctgggggcgagccgcgcgcgggaccgcgcttccgggttcggggcgtccgcaaccacagcgcgcagggcaggcgcgagctggcctctgagccccggcctcggaccgcccactccactcccggcacgcccggtgccgccttccggctccagtccccgggctcggcctcggcgaggtgtaattcgcagcgcgggccggccccggaggctctcggcgagcgcggcgcggtaacaagtgggcgaggatgccgtacgagatcaagaaggtgttcgccagcctcccgcaggtggagaggggcgtctccaagatcatcggcggcgaccctaagggcaacaattttctgtacaccaatggaaagtgcgtcatcctaaggaacatcgacgaccacagccgctttgtcaactgtgtgcgattctctcctgatgggaacagatttgccacagccagtgctgacggccagatatacatctatgacgggaagactggggagaaggtgtgcgcgctgggcggaagcaaggcccacgacggtgggatttacgcaattagttggagtcccgacagcacccatttgctttctgcttctggggacaaaacttccaagatttgggacgtcagcgtgaactccgtggtcagcacatttcccatgggctccacggttctggaccagcagctgggctgcctatggcagaaggaccacctgctcagtgtctccctgtccgggtacatcaactatctggacagaaacaaccccagcaagcccctgcacgtcatcaagggtcacagtaaatcgatccagtgtctgacggtgcataaaaacggcggcaagtcctacatttactctgggagccacgacggacacattaattactgggattcagagacgggggagaacgactccttcgctgggaaaggccacacgaaccaggtgtccaggatgaccgtggatgagtcggggcagctcatcagctgcagcatggacgacaccgtgcggtacaccagcctcatgctgcgggactacagcggacaaggagttgtgaaactggacgttcagccaaagtgcgtagccgtcggccccgggggatacgccgtggtcgtgtgcattggacagattgtcctgctgaaggatcagaggaagtgcttcagcatcgacaaccccggctacgagcccgaagttgtggcagtgcaccccggcggggacacggtggcaattgggggtgtggacggcaacgtccgcctgtattccatcctgggcaccacgctgaaggatgagggcaagctcctagaggccaagggccccgtgaccgacgtggcctactcccacgacggcgccttcctcgcggtgtgcgacgccagcaaggtggtcacagtgttcagcgttgctgacggctactcggagaacaatgttttttatggacaccatgcaaaaatcgtctgcctggcctggtccccagacaatgaacactttgcctccggtggcatggacatgatggtgtatgtttggaccctgagtgacccggaaaccagagtcaagatccaagatgcacaccggctgcaccatgtcagcagcctggcctggctggacgagcacacgctggtcacgacctcccatgatgcctctgtcaaggagtggacaatcacctactgaggagccccacccccgcctctggatggaccgaatcagggactagagtttaactgcagcggaacatgtcatttctctatttctgtgacgcgcccccatgcccccaccccaccacaagaggcaggagggcccagtcatgaccctcgtctctgcagggtgtctgtacacgttcttctgaaagctttagacagtaacagtttgcacatgaaaaataaagcgagcacctaaacaatgtgtggagcataactaaaacccacagcccaaccaaaccttgagaatgcgaaacattccagaggcagtagcctccaaagcacacagagcccctggccccgccgcggctctcactatctgtcaggggaggttgtacaggtgaatgagccggggggctcatgttcctgcctgcagaacatttctgtactagtgagaagagggaatatgcattgcagttcagcaaagccggaattctgtgttgaacagatgtctgtctccctagtgtgtgactcacaccttgtggctgccttcagagcgccacctccagatcagatggggacacacaacccctggatatgtttcattgtcagattttgtgcttgattttaagaatggaattgtgggtatctttcctttttttttaatgtatcttaactgttgcctgtcagtgtttacaaactagtgcgttgacggcaccgtgtccaagtttttagaacccttgttagccagaccgaggtgtcctggtcaccgtttcaccatcatgctttgatgttcccctgtctttccctcttctgctctcaagagcaaaggttaatttaaggacaaagatgaagtcactgtaaactaatctgtcattgtttttaccttccttttctttttcagtgcagaaattaaaagtaagtataaagcaccgtgattgggagtgtttttgcgtgtgtcggaatcactggtaaatgttggctgagaacaatccctccccttgcacttgtgaaaacactttgagcgctttaagagattagcctgagaaataattaaatatcttttctcttcaaaaaaaaaaaaaaaaaa

SEQ ID NO: 586 - DNA, 2194 bp, Homo sapiens
  ref <308>: DATABASE ACCESSION NUMBER: NCBI / NM_005370
  ref <309>: DATABASE ENTRY DATE: 2011-12-18
  ref <313>: RELEVANT RESIDUES IN SEQ ID NO: (1)..(2194)
gtgccggccaatgggaggtgcgctcgggctgcttccggctccgcgctccgctcgccccctcccaaggtctccccgcgactggcgggacgcaggggcgggcgtcggccgcggtgacgcgcagcgggcctggagccaataaggggcgggctcggtgctgatggacggtgctggtggccagtggagaggcgctggccgcacttcccgtcggggagagagtgtaatatggcgaagacctacgattacctgttcaagctgctgctgatcggggactcgggggtggggaagacctgtgtcctgttccgcttctccgaggacgccttcaactccacttttatctccaccataggaattgactttaaaattaggaccatagagctcgatggcaagagaattaaactgcagatatgggacacagccggtcaggaacggtttcggacgatcacaacggcctactacaggggtgcaatgggcatcatgctggtctacgacatcaccaacgagaagtccttcgacaacatccggaactggattcgcaacattgaggagcacgcctctgcagacgtcgaaaagatgatactcgggaacaagtgtgatgtgaatgacaagagacaagtttccaaggaacggggagaaaagctggccctcgactatggaatcaagttcatggagaccagcgcgaaggccaacatcaatgtggaaaatgcatttttcactctcgccagagatatcaaagcaaaaatggacaaaaaattggaaggcaacagcccccaggggagcaaccagggagtcaaaatcacaccggaccagcagaagaggagcagctttttccgatgtgttcttctgtgaggaacaccgccttactctgagcctcgctcagcccagctgactgtgcctgttctgagtgagcccctcactcagccggggccctcccacctccaacgccccgcccacgccgcggccaccgggcccacggccaccagaatgcaattgagaaatcgtttattttagtaactgtctgatctttttcaactttggagatggaataagttaaaaatttgctatttttcctgtaacatctgctgaacgggcccacccacacgttgtatattcagagagagagagggagtcaaggtgtgaccgtcgaccacagccagtgtcaggcctctgcctctgggcctttgctttgtggcctcactgcaacacaaagctccaccaggaggctggttcacgtcccctaccacggaagcgaggtcccagaaggccagcggtggttccaggagcaacagctcccaaaccctgagcaaggcaaccgatcgccaggaccaggaagcatcacccaggagatttggcgcccacttccacctcttctctcagttttggacaagtgacaaaccattttgccccctcactcttcttttttaactgttaaaccaaaggaaagcacaaatgaaggaaatcctgtgtaaagcattgagaaggaaagaagcctggagcagcctctcctgtccacagccaggggttaggtctgcaggcccgtctgcggtccccatcgagcatcaaggggacgctgtgtgtgctgcaagtgaccccgaaaacaaccacagccgtcacatggtcctcctgaagttggggcaccctcctctcagcaccaaaatggcccccactccttcgtgtcctcccgctatctccaaatcggacgttctttctagctgagatttttatttttccacatctgtagtgccatgaagcgattctgtctttgacttccaatggcaaacctgggtgatcgggaacaagcacgttgtacccttggctggacatggccaagacacaaggcattccacggcggcaagctgaccgcacagcagtctggcttgattttcagccgtcatcattgggttctgttttgacagctctgctgtcccatagggactgcgactgggaccaggtcaaccacgccaggggggtgtcaccagccttttctttttttctttctttttttttttttcctccttaagctgctgtcaatccaaaccattggcatcatcgtttcttttgaattaaaaccaacatatcagcaatagtctgctctccccgggaatctctaacatgctctgtttacatcgataaatgcacttaaggaaaacaaacaaattaaagctcatcttaaagtccaaaaaaaaaaaaaaaaaaa

SEQ ID NO: 587 - DNA, 8434 bp, Homo sapiens
  ref <308>: DATABASE ACCESSION NUMBER: NCBI / NM_006289
  ref <309>: DATABASE ENTRY DATE: 2011-11-27
  ref <313>: RELEVANT RESIDUES IN SEQ ID NO: (1)..(8434)
ggaagagttctagcctgaaagggaactcgggcgtcgtcctggcgtcctctccggattgcgccgcaccctcgcttcctgccagggaggggctgccgggctttggcggctcccgagcatcgagaacggggccagagcagcttcctgcctgccccccgcgaccatagagcgcgggcccagggcgccgcccgcgggtgggggacgttcccaggacggaagtggccgagagagtgtcgaagggagggcgaggccggagcccgagggcgacccgagaagcggcggggcggcgggccggcgggcggggcgcagagccaggcagcgcaggtatagccaggctggagaaaagaagctgccaccatggttgcactttcactgaagatcagcattgggaatgtggtgaagacgatgcagtttgagccgtctaccatggtgtacgacgcctgccgcatcattcgtgagcggatcccagaggccccagctggtcctcccagcgactttgggctctttctgtcagatgatgaccccaaaaagggtatatggctggaggctgggaaagctttggactactacatgctccgaaatggggacactatggagtacaggaagaaacagagacccctgaagatccgtatgctggatggaactgtgaagacgatcatggtggatgactctaagactgtcactgacatgctcatgaccatctgtgcccgcattggcatcaccaatcatgatgaatattcattggttcgagagctgatggaagagaaaaaggaggaaataacagggaccttaagaaaggacaagacattgctgcgagatgaaaagaagatggagaaactaaagcagaaattgcacacagatgatgagttgaactggctggaccatggtcggacactgagggagcagggtgtagaggagcacgagacgctgctgctgcggaggaagttcttttactcagaccagaatgtggattcccgggaccctgtacagctgaacctcctgtatgtgcaggcacgagatgacatcctgaatggctcccaccctgtctcctttgacaaggcctgtgagtttgctggcttccaatgccagatccagtttgggccccacaatgagcagaagcacaaggctggcttccttgacctgaaggacttcctgcccaaggagtatgtgaagcagaagggagagcgtaagatcttccaggcacacaagaattgtgggcagatgagtgagattgaggccaaggtccgctacgtgaagctagcccgttctctcaagacttacggtgtctccttcttcctggtgaaggaaaaaatgaaagggaagaacaagctagtgcccaggcttctgggcatcaccaaggagtgtgtgatgcgagtggatgagaagaccaaggaagtgatccaggagtggaacctcaccaacatcaaacgctgggctgcgtctcccaaaagcttcaccctggattttggagattaccaagatggctattactcagtacagacaactgaaggggagcagattgcacagctcattgccggctacatcgatatcatcctgaagaagaaaaaaagcaaggatcactttgggctggaaggagatgaggagtctactatgctggaggactcagtgtcccccaaaaagtcaacagtcctgcagcagcaatacaaccgggtggggaaagtggagcatggctctgtggccctgcctgccatcatgcgctctggagcctctggtcctgagaatttccaggtgggcagcatgccccctgcccagcagcagattaccagcggccagatgcaccgaggacacatgcctcctctgacttcagcccagcaggcactcactggaaccattaactccagcatgcaggccgtgcaggctgcccaggccaccctggatgactttgacactctgccgcctcttggccaggatgctgcctctaaggcctggcgtaaaaacaagatggatgaatcaaagcatgagatccactctcaggtagatgccatcacagctggtactgcgtctgtggtgaacctgacagcaggggaccctgctgagacagactataccgcagtgggctgtgcagtcaccacaatctcctccaacctgacggagatgtcccgtggggtgaagctgctggctgccttgctggaggacgaaggcggcagtggtcggcccctgttgcaggcagcaaagggccttgcgggagcagtgtcagaactgctgcgcagtgcccaaccagccagtgctgagccccgtcagaacctgctgcaagcagctgggaacgtgggccaggccagtggggagctgttgcaacaaattggggaaagtgatactgacccccacttccaggatgcgctaatgcagctcgccaaagctgtggcaagtgctgcagctgccctggtcctcaaggccaagagtgtggcccagcggacagaggactcgggacttcagacccaagttattgctgcagcaacacagtgtgccctatccacttcccaactagtggcctgtactaaggtggtggcacctacaatcagctcacctgtctgccaagagcaactggtggaggctggacgactggtagccaaagccgtggagggctgtgtgtctgcctcccaggcagctacagaggatgggcaactgttgcgaggggtaggagcagcagccacagctgtcacccaggccctaaatgagctgctgcagcatgtgaaagcccatgccacaggggctgggcctgctggccgttatgaccaggctactgacaccatcctaaccgtcactgagaacatctttagctccatgggtgatgctggggagatggtgcgacaggcccgcatcctggcccaagccacatctgacctggtcaatgccatcaaggctgatgctgagggggaaagtgatctggagaactcccgcaagctcttaagtgctgccaagatcctagctgatgccacagccaagatggtagaggctgccaagggagcagctgcccaccctgacagtgaggagcagcagcagcggctgcgggaggcagctgaggggctgcgcatggccaccaatgcagctgcgcagaatgccatcaagaaaaagctggtgcagcgcctggagcatgcagccaagcaggctgcagcctcagccacacagaccatcgctgcagctcagcacgcagcctctacccccaaggcctctgccggcccccagcccctgctggtgcagagctgcaaggcagtggcagagcagattccactgctggtgcagggcgtccgaggaagccaagcccagcctgacagccccagcgctcagcttgccctcattgctgccagccagagcttcctgcagccaggtgggaagatggtggcagctgcaaaggcctcagtgccaacgattcaggaccaggcttcagccatgcagctgagtcagtgtgccaagaacctgggcaccgcgctggctgaactccggacggctgcccagaaggctcaggaagcatgtggacctttggagatggattctgcactgagtgtggtacagaatctagagaaagatctacaggaagtgaaggcagcagctcgagatggcaagcttaaacccttacctggggagacaatggagaagtgtacccaggacctgggcaacagcaccaaagccgtgagctcagccatcgcccagctactgggagaggttgcccagggcaatgagaattatgcaggtattgcagctcgggatgtggcaggtgggctgcggtcactggcccaggccgctaggggagtcgctgcactgacgtcagatcctgcagtgcaggccattgtacttgatacggccagtgatgtgctggacaaggccagcagcctcattgaggaggcgaaaaaggcagctggccatccaggggaccctgagagccagcagcggcttgcccaggtggctaaagcagtgacccaggctctgaaccgctgtgtcagctgcctacctggccagcgcgatgtggataatgccctgagggcagttggagatgccagcaagcgactcctgagtgactcgcttcctcctagcactgggacatttcaagaagctcagagccggttgaatgaagctgctgctgggctgaatcaggcagccacagaactggtgcaggcctctcggggaacccctcaggacctggctcgagcctcaggccgatttggacaggacttcagcaccttcctggaagctggtgtggagatggcaggccaggctccgagccaggaggaccgagcccaagttgtgtccaacttgaagggcatctccatgtcttcaagcaaacttcttctggctgccaaggccctgtccacggaccctgctgcccctaacctcaagagtcagctggctgcagctgccagggcagtaactgacagcatcaatcagctcatcactatgtgcacccagcaggcacccggccagaaggagtgtgataacgccctgcgggaattggagacggtccgggaactcctggagaacccagtccagcccatcaatgacatgtcctactttggttgcctggacagtgtaatggagaactcaaaggtgctgggcgaggccatgactggcatctcccaaaatgccaagaacggaaacctgccagagtttggagatgccatttccacagcctcaaaggcactttgtggcttcaccgaggcagctgcacaggctgcatatctggttggtgtctctgaccccaatagccaagctggacagcaagggctagtggagcccacacagtttgcccgtgcaaaccaggcaattcagatggcctgccagagtttgggagagcctggctgtacccaggcccaggtgctctctgcagccaccattgtggctaaacacacctctgcactgtgtaacagctgtcgcctggcttctgcccgtaccaccaatcctactgccaagcgccagtttgtacagtcagccaaggaggtggccaacagcacagctaatcttgtcaagaccatcaaggcgctagatggggccttcacagaggagaaccgtgcccagtgccgagcagcaacagcccctctgctggaggctgtggacaatctgagtgcctttgcgtccaaccctgagttctccagcattcctgcccagatcagccctgagggtcgggctgccatggagcccattgtgatctctgccaagacaatgttagagagtgccgggggactcatccagacagcccgggccctcgcagtcaatccccgggaccccccgagctggtcggtgctggccggccactcccgtactgtctcagactccatcaagaagctaattacaagcatgagggacaaggctccagggcagctggagtgtgaaacggccattgcagctctgaacagttgtctacgggacctagaccaggcttccctcgctgcagtcagccagcagcttgctccccgtgagggaatctctcaagaggccttgcacactcagatgctcactgcagtccaagagatctcccatctcattgagccgctggccaatgctgcccgggctgaagcctcccagctgggacacaaggtgtcccagatggcgcagtactttgagccgctcaccctggctgcagtgggtgctgcctccaagaccctgagccacccgcagcagatggcactcctggaccagactaaaacattggcagagtctgccctgcagttgctatacactgccaaggaggctggtggtaacccaaagcaagcagctcacacccaggaagccctggaggaggctgtgcagatgatgaccgaggccgtagaggacctgacaacaaccctcaacgaggcagccagtgctgctggggtcgtgggtggcatggtggactccatcacccaggccatcaaccagctagatgaaggaccaatgggtgaaccagaaggttccttcgtggattaccaaacaactatggtgcggacagccaaggccattgcagtgaccgttcaggagatggttaccaagtcaaacaccagcccagaggagctgggccctcttgctaaccagctgaccagtgactatggccgtctggcctcggaggccaagcctgcagcggtggctgctgaaaatgaagagataggttcccatatcaaacaccgggtacaggagctgggccatggctgtgccgctctggtcaccaaggcaggcgccctgcagtgcagccccagtgatgcctacaccaagaaggagctcatagagtgtgcccggagagtctctgagaaggtctcccacgtcctggctgcgctccaggctgggaatcgtggcacccaggcctgcatcacagcagccagcgctgtgtctggtatcattgctgacctcgacaccaccatcatgttcgccactgctggcacgctcaatcgtgagggtactgaaactttcgctgaccaccgggagggcatcctgaagactgcgaaggtgctggtggaggacaccaaggtcctggtgcaaaacgcagctgggagccaggagaagttggcgcaggctgcccagtcctccgtggcgaccatcacccgcctcgctgatgtggtcaagctgggtgcagccagcctgggagctgaggaccctgagacccaggtggtactaatcaacgcagtgaaagatgtagccaaagccctgggagacctcatcagtgcaacgaaggctgcagctggcaaagttggagatgaccctgctgtgtggcagctaaagaactctgccaaggtgatggtgaccaatgtgacatcattgcttaagacagtaaaagccgtggaagatgaggccaccaaaggcactcgggccctggaggcaaccacagaacacatacggcaggagctggcggttttctgttccccagagccacctgccaagacctctaccccagaagacttcatccgaatgaccaagggtatcaccatggcaaccgccaaggccgttgctgctggcaattcctgtcgccaggaagatgtcattgccacagccaatctgagccgccgtgctattgcagatatgcttcgggcttgcaaggaagcagcttaccacccagaagtggcccctgatgtgcggcttcgagccctgcactatggccgggagtgtgccaatggctacctggaactgctggaccatgtactgctgaccctgcagaagccaagcccagaactgaagcagcagttgacaggacattcaaagcgtgtggctggttccgtcactgagctcatccaggctgctgaagccatgaagggaacagaatgggtagacccagaggaccccacagtcattgctgagaatgagctcctgggagctgcagccgccattgaggctgcagccaaaaagctagagcagctgaagccccgggccaaacccaaggaggcagatgagtccttgaactttgaggagcagatactagaagctgccaagtccattgcagcagccaccagtgcactggtaaaggctgcgtcggctgcccagagagaactagtggcccaagggaaggtgggtgccattccagccaatgcactggacgatgggcagtggtcccagggcctcatttctgctgcccggatggtggctgcggccaccaacaatctgtgtgaggcagccaatgcagctgtacaaggccatgccagccaggagaagctcatctcatcagccaagcaggtagctgcctccacagcccagctccttgtggcctgcaaggtcaaggctgaccaggactcggaggcaatgaaacgacttcaggctgctggcaacgcagtgaagcgagcctcagataatctggtgaaagcagcacagaaggctgcagcctttgaagagcaggagaatgagacagtggtggtgaaagagaagatggttggcggcattgcccagatcatcgcagcacaggaagaaatgcttcggaaggaacgagagctggaagaggcgcggaagaaactggcccagatccggcagcagcagtacaagtttctgccttcagagcttcgagatgagcactaaagaagcctcttctatttaatgcagacccggcccagagactgtgcgtgccactaccaaagccttctgggctgtcggggcccaacctgcccaaccccagcactccccaaagtgcctgccaaaccccagggcctggccccgcccagtcccgcagtacatcccctgtcccctccccaaccccaagtgccttcatgccctagggccccccaagtgcctgcccctccccagagtattaacgctccaagagtattattaacgctgctgtacctcgatctgaatctgccggggccccagcccactccaccctgccagcagcttccggccagtccccacagcctcatcagctctcttcaccgttttttgatactatcttcccccacccccagctacccataggggctgcagagttataagccccaaacaggtcatgctccaataaaaatgattctacctacaa

SEQ ID NO: 588 - DNA, 1595 bp, Homo sapiens
  ref <308>: DATABASE ACCESSION NUMBER: NCBI / NM_005698
  ref <309>: DATABASE ENTRY DATE: 2011-08-14
  ref <313>: RELEVANT RESIDUES IN SEQ ID NO: (1)..(1595)
tgggttagaggtatcacgtgggggcactttcgtcttagcttttggacaagacgcaggcgcaacccacggctgctgcggggatccttgtggcccttccggtcggtggaaccaatccgtgcacagagaagcggggcgaactgaggcgagtgaagtggactctgagggctaccgctaccgccactgctgcggcaggggcgtggagggcagagggccgcggaggccgcagttgcaaacatggctcagagcagagacggcggaaacccgttcgccgagcccagcgagcttgacaacccctttcaggacccagctgtgatccagcaccgacccagccggcagtatgccacgcttgacgtctacaacccttttgagacccgggagccaccaccagcctatgagcctccagcccctgccccattgcctccaccctcagctccctccttgcagccctcgagaaagctcagccccacagaacctaagaactatggctcatacagcactcaggcctcagctgcagcagccacagctgagctgctgaagaaacaggaggagctcaaccggaaggcagaggagttggaccgaagggagcgagagctgcagcatgctgccctggggggcacagctactcgacagaacaattggccccctctaccttctttttgtccagttcagccctgctttttccaggacatctccatggagatcccccaagaatttcagaagactgtatccaccatgtactacctctggatgtgcagcacgctggctcttctcctgaacttcctcgcctgcctggccagcttctgtgtggaaaccaacaatggcgcaggctttgggctttctatcctctgggtcctccttttcactccctgctcctttgtctgctggtaccgccccatgtataaggctttccggagtgacagttcattcaatttcttcgttttcttcttcattttcttcgtccaggatgtgctctttgtcctccaggccattggtatcccaggttggggattcagtggctggatctctgctctggtggtgccgaagggcaacacagcagtatccgtgctcatgctgctggtcgccctgctcttcactggcattgctgtgctaggaattgtcatgctgaaacggatccactccttataccgccgcacaggtgccagctttcagaaggcccagcaagaatttgctgctggtgtcttctccaaccctgcggtgcgaaccgcagctgccaatgcagccgctggggctgctgaaaatgccttccgggccccgtgacccctgactgggatgccctggccctgctacttgagggagctgacttagctcccgtccctaaggtctctgggacttggagagacatcactaactgatggctcctccgtagtgctcccaatcctatggccatgactgctgaacctgacaggcgtgtggggagttcactgtgacctagtccccccatcaggccacactgctgccacctctcacacgccccaacccagcttccctctgctgtgccacggctgttgcttcggttatttaaataaaaagaaagtggaactggaactgacaaaaaaaaaaaaaaaaaaaaaaaa

SEQ ID NO: 589 - DNA, 2650 bp, Homo sapiens
  ref <308>: DATABASE ACCESSION NUMBER: NCBI / NM_024011
  ref <309>: DATABASE ENTRY DATE: 2011-11-26
  ref <313>: RELEVANT RESIDUES IN SEQ ID NO: (1)..(2650)
atcattaggcgtcaacacaggaagtgaggatacttctggcgagcgccggttgctgtttcttctcaggctcagggaccggccgcggccccgtagggtgttttaactcaaatgggtgatgaaaaggactcttggaaagtgaaaactttagatgaaattcttcaggaaaagaaacgaaggaaggaacaagaggagaaagcagagataaaacgcttaaaaaattctgatgaccgggattccaagcgggattcccttgaggagggggagctgagagatcactgcatggagatcacaataaggaactccccgtatagaagagaagactcaatggaagacagaggagaagaagatgattctttggccatcaaaccaccccagcaaatgtctcggaaagaaaaagttcatcacagaaaagatgaaaagagaaaagaaaaatgtaggcatcatagccattcagcagaaggggggaagcatgctagagtgaaagaaagagagcacgaacgtcggaaacgacatcgagaagaacaggataaagctcgccgggaatgggaaagacagaagagaagggaaatggcaagggagcattccaggagagaaagggaccgcttggagcagttagaaaggaagcgggagcgggagcgcaagatgcgggagcagcagaaggagcagcgggagcagaaggagcgcgagcggcgggcggaggagcggcgcaaggagcgggaggcccgcagggaagtgtctgcacatcaccgaacgatgagagaggactacagcgacaaagtgaaagccagccactggagtcgcagcccgcctcggccgccgcgggagcggttcgagttgggagacggccggaagccagtaaaagaagagaaaatggaagaaagggacctgctgtccgacttacaggacatcagcgacagcgagaggaagaccagctcggccgagtcctcgtcagcggaatcaggctcaggttctgaggaagaagaggaggaggaggaagaggaggaggaggaagggagcaccagtgaagaatcagaggaggaggaggaggaagaggaagaggaggaggaggagaccggcagcaactctgaggaggcatcagagcagtctgccgaagaagtaagtgaggaagaaatgagtgaagatgaagaacgagaaaatgaaaaccacctcttggttgttccagagtcacggttcgaccgagattccggggagagtgaagaagcagaggaagaagtgggtgagggaacgccgcagagcagcgccctgacagagggcgactatgtgcccgactcccctgccctgttgcccatcgagctcaagcaggagctgcccaagtacctgccggccctgcagggctgccggagcgtcgaggagttccagtgcctgaacaggatcgaggagggcacctatggagtggtctacagagcaaaagacaagaaaacagatgaaattgtggctctaaagcggctgaagatggagaaggagaaggagggcttcccgatcacgtccctgagggagatcaacaccatcctcaaggcccagcatcccaacattgtcaccgttagagagattgtggtgggcagcaacatggacaagatctacatcgtgatgaactacgtggagcacgacctcaagagcctgatggagaccatgaaacagcccttcctgccaggggaggtgaagaccctgatgatccagctgctgcggggggtgaaacacctgcacgacaactggatcctgcaccgtgacctcaagacgtccaacctgctgctgagccacgccggcatcctcaaggtgggtgattttgggctggcgcgggagtacggatcccctctgaaggcctacaccccggtcgtggtgacccagtggtaccgcgccccagagctgctgcttggtgccaaggaatactccacggccgtggacatgtggtcagtgggctgcatcttcggggagctgctgactcagaagcctctgttccccgggaattcggaaatcgatcagatcaacaaagtgttcaaggagctggggacccccagtgagaaaatctggcccggctacagtgagctcccagtagtcaaaaagatgaccttcagcgagcacccctacaacaacctccgcaagcgcttcggggctctgctctcagaccagggcttcgacctcatgaacaagttcctgacctacttccccgggaggaggatcagcgctgaggacggcctcaagcatgagtatttccgcgagacccccctccccatcgacccctccatgttccccacgtggcccgccaagagcgagcagcagcgtgtgaagcggggcaccagcccgaggccccctgagggaggcctgggctacagccagctgggtgacgacgacctgaaggagacgggcttccaccttaccaccacgaaccagggggcctctgccgcgggccccggcttcagcctcaagttctgaaggtcagagtggaccccgtcatggggagaactcagccgggaccacaggcgtggctactgcggctggagctgcgatgagactcggaactcctcgtcttactttgtgctccatgttttgtttttgtattttggtttgtaaatttgtagaattaaatcattttccttgttgtggaggaaaaaaaaaaaaaaaaaaaaaaaaa

SEQ ID NO: 590 - DNA, 4973 bp, Homo sapiens
  ref <308>: DATABASE ACCESSION NUMBER: NCBI / NM_005105
  ref <309>: DATABASE ENTRY DATE: 2011-11-28
  ref <313>: RELEVANT RESIDUES IN SEQ ID NO: (1)..(4973)
agagttagcctttgattggtcagcttgactggcgacctttcccctctgcgacagtttcccgaggtacctagtgtctgagcggcacagacgagatctcgatcgaaggcgagatggcggacgtgctagatcttcacgaggctgggggcgaagatttcgccatggatgaggatggggacgagagcattcacaaactgaaagaaaaagcgaagaaacggaagggtcgcggctttggctccgaagaggggtcccgagcgcggatgcgtgaggattatgacagcgtggagcaggatggcgatgaacccggaccacaacgctctgttgaaggctggattctctttgtaactggagtccatgaggaagccaccgaagaagacatacacgacaaattcgcagaatatggggaaattaaaaacattcatctcaacctcgacaggcgaacaggatatctgaaggggtatactctagttgaatatgaaacatacaaggaagcccaggctgctatggagggactcaatggccaggatttgatgggacagcccatcagcgttgactggtgttttgttcggggtccaccaaaaggcaagaggagaggtggccgaagacgcagcagaagtccagaccggagacgtcgctgacaggtcctctgttgtccaggtgttctcttcaagattccatttgaccatgcagccttggacaaataggactggggtggaacttgctgtgtttatatttaatctcttaccgtatatgcgtagtatttgagttgcgaataaatgttccatttttgttttctacatttaatgttactttcctgtcctaaaattgaaagttctaaagcatagcaaggctgtatggatcattgtgaagatacttctagggactgaactctatgtatttcttttttttcttttttttgagatagagtcttgctgtgttacccagggtggattgcagctgatcatagctcactgcagcttcaaactcttgggctcaagccatccttctgcctcactgtccctagtagttgggattacaggcacatgccaccatgcccagctaaatttttaatatttttgtagagatggggtcttgctgtgttacctgggctagttatgtgagtttctatattagacatagtctcaagtttcaggtagggtttaaagtagagacactggtcagtatttcttttttggggggaactaggagagcaggagtagaagtgagatgttaagatcttatggcactaaagacttactattctgttcctacatactctgttaggatcagatagatgttatagaaatgccttttgtttctcctgcccttcttgatgtcacagttttttgtacttccagctgtctaaaggcatgaatctcctcttggagcattctcccagacccttctttagaagagtctatactaagttcttggtgccctcttcggcagccaagggtgaaggccccatagaggagaggatccaaaggagcattgaggaggcccaagaggaaaaggatgtggctcaggctgggagggacttcagttagcatggtgggggagaaccagtaccacatacccagtaggtaataaggtgtccagcagaggatgaaggtcagcaagataagcagggccagtctcagggcccggagacgaacacggggacaattgtcaaaggagcgggggagggcaaattcaccagcaggggctaggaatttagaaaatatactgtaattcagacactcagcttctgatctgagtatagggtgaattgatggaggggcatagctagtgagacagagctcacctcctacaaggaggagaatgttgcaaaccgttttccccttcccaacctgggactatatgatttcttacccccagggattatgatagaaatatgaagccaccaagtctagacttgatggtgttcaagaataaataatactgattgcctccctagtccttgtccagctaactcagctgtttataattgaagggattcaacaaaattatctctagcatcaggtgctagacatggttagaatctcaccatggtttagtgactggtagatagctattaggtaggtagataaataaatgatgctagaggcaacaggtctagggttaaggattaaggcctgggaattggagtctcaccatggctccccttccttgtctggggcctggacacactgaggacaatgcggctatagcagatggccatggcagtcagtggcagcagaaagaggcagcagaaggtgaagaggttataggtggtctcttgccattgagccttgaagctgcctttggtgacacactgagtgaaagggactgggccagctcagtggaccgtgtggaacaggaacagctggagtggagttgaggactattagaactggttcccctcaccacccaacctacccacctatgtcatactgtctcctcccaattcatccttaattccaagtgaagcagcacagtgctgagaaacagttcatccatggtgccatgttaaagaagttggaaatatatcttgaaaatcctatcttccttttaggcttgaatatgatgctgaacagtaagtttgttaaatcttggaacttaaaacaatcctgctttctcaagtactattctaacattgcgctttataagggatgatatttctaccacctcactcatatttttagctgaaatgattttcctggtatgtctgttattttgtggaaaaagaaatattgtgtaaaatgggtgctgccaaaattccaggccattttgcagggactctgaagtgacctttagtagtaatagtcttatgtgcagtaactataatggtaaagaatgttaaataataaaatttaacattttccaaatgctattgggctgcccctccccctttttgttaaattgctgggttttccaactgaatcagtaaaaactatttctgtttagagctacaaggttaaagtgcctgctttccagtaatggagattgagtcactattaatttgataaaaggtaagctcagtaggcatcagattcctagatacaaggcatttgggaaagtgattttagcagacatgagggacatttaggaaagatgaatagtttcagcctaagagaattttgtgaactgtttggagttacgatcaggctactctgagctagttgggaaatggtctttcctcttcccatctcttgcattcatatatttctaagttttttttttttttttgtttttgtgctctgcctaagaagtgcttgagaattgtgaggagtataaaaatagtcaaagctggctgggcgcggtggctcacgcctgtaatcccagcactttgggaggctgaggcgggcggatcacgaggttaggagatggagaccatcctggctaacacagtgaaaccctgtctgtactaaagatacaaaaaactagccgggcgtggtggtaggtgcctgtagtcccagctacttgggaactcgggaggctgaggcaggagaatgacctgaacccaggaggcggagcttgcagtgagcagagattgcgccattgcactccagcctgggcgacagagtaagactgtctccaaaaaaaaaaaaaataataatcaaagctcttggatttatagtttggtccacagccttgttttgatctttcctttatcctgttttattgccatttaccacgtactgtagaaacatccctttcaactgctgataacttggaaacaagcctacaaaaataagtaatttctaactactcctaatactacctataactacccctaagcccttaccactctaacgtgacattattaaattttttattttattaacactaatattttaactacaattacagcatatgggcaatacagaatttacctaaaaggatactaatttggaacaaaaaaaatcacctttcgcacatgtatcatgtcacaaccagtttgccattgaaacaaatagaggttgcaaatattgtcagattgtcaggctgtaagaaaggatgaaattcatttcccattgcatcatcttgtggcccatggatttcaagtgccttagccaaaatcatatagctagttagcagtagagccgagactcagaaaaaaacaaagtaaaacaggcagactgaaacaaaaagtcttctaattcccagtccacatgtaaaatttgcttcatataaacaaacctaattgtaaatggcactgtagcaacaggcttctttttaacacttggattggtaaaggtcttgtttgcaacatattagaagtattatttttctctttcccccccaccccacccccaacagagtctggctctgccgcccacgccggagtgcagtggtgcagtcttggctcactgcagcctccacttcccaggttcaagcaattctcgtgcctcagcctcctgagtagttgggattacaggtgctcaccactatacccggctaatttttgtatttttagtagagatggggtttcgtcatgttggccaggttggtcttaaactcctgacctcaagtgatccacccaccttggccttccaaaatgctgggattacaggcttgagccaccaggcctttctttgttcttaggagtatagtcagactaacttctagtagttatatttctaataattgaggatgtaagtaaggatcaaatcttaaatcagtataatgcattgtcattccagagataaatcctagacccttcttggcctccttctgacataattctaatcctacagtctcagagatgctgttgtatcctgccccccaaccccatgatagtgatagtggtttttgccttgaaggaattgctttgtatttagcttttccccctctagatttctagttccttttcagtattggattggatttgagatttgattaacctagtactcaggttcagatgctcgcctctttgcaattttaacactcattcgacaataaagtcagtaaaaaacacaaaaaaaaaaaaaaaa

SEQ ID NO: 591 - DNA, 2335 bp, Homo sapiens
  ref <308>: DATABASE ACCESSION NUMBER: NCBI / NM_006013
  ref <309>: DATABASE ENTRY DATE: 2011-11-27
  ref <313>: RELEVANT RESIDUES IN SEQ ID NO: (1)..(2335)
gggctacgcccgggcgcaagcgccaagagcggctgcgtctatggtcatgacgtctgacagagcgtccacccgtcttcgacaggactctatggttcttacgcgcgcagacagaccgcctatataagccatgcgcaggcggaggagcgcctctttcccttcggtgtgccactgaagatcctggtgtcgccatgggccgccgccccgcccgttgttaccggtattgtaagaacaagccgtacccaaagtctcgcttctgccgaggtgtccctgatgccaagattcgcatttttgacctggggcggaaaaaggcaaaagtggatgagtttccgctttgtggccacatggtgtcagatgaatatgagcagctgtcctctgaagccctggaggctgcccgaatttgtgccaataagtacatggtaaaaagttgtggcaaagatggcttccatatccgggtgcggctccaccccttccacgtcatccgcatcaacaagatgttgtcctgtgctggggctgacaggctccaaacaggcatgcgaggtgcctttggaaagccccagggcactgtggccagggttcacattggccaagttatcatgtccatccgcaccaagctgcagaacaaggagcatgtgattgaggccctgcgcagggccaagttcaagtttcctggccgccagaagatccacatctcaaagaagtggggcttcaccaagttcaatgctgatgaatttgaagacatggtggctgaaaagcggctcatcccagatggctgtggggtcaagtacatccccaatcgtggccctctggacaagtggcgggccctgcactcatgagggcttccaatgtgctgcccccctcttaatactcaccaataaattctacttcctgtccacctatgtctttgtatctacattcttgacggggaaggaacttcctctgggaacctttgggtcattgccctttcacttcagaaacaggttgacaactcagccctgctcatgaggcagcaaaccctgcaaagggctgggactggtggccttatgtcagttgtctactctggagcttgacttggacctccccaggtcctaggcagtaggttgaaaaacactgaagtgcttttcatgaagcacagctgcagcaaagccttgcaatcccaggctggggtcagcctacagttgtgttgcttattacaacacatgcggaccaagaggggcttgtgggctagaggctgaccagcagcgtttatttagcaagggtaggtgtgcatcacattgggcttgttctcacccatctggtttggccattcctccttggtgggaatcatccaggtactgctgaggtcacctgcgatttgccccatttcctatctctagcaacctcctgggccccatgcccccaccccttctagaacctgcattcccagggccttcaccacctgaccaaaggtctaggctaacctttggtcatttgtaacaagacctcggaacagacacgtgtgtggcatggtttggcctggggatcttagatgtctgacctgaactattgtagaacagcgctggcttttgggggagcagcaaaaatgagaggagtgctaggtgggtggcctgagcatctgtatccagggacaggactccaaaggcttttggtcccagagctggggtatgttggccccagcccccagcctgtggctcccaaaaggcctctggttttttgtaatctcagtttacagccatttcttaggtttttaattacctttattttattttgccaaacatacctgggaataccttttattttttttttaccttggggtgatggttccaaaccataaatgtgattatagttaacacatgacccttctagcgtcccagccagtgtttttcctgacctctgttctttggagaggaggatggaagggaggggtccggcacgctgctggcattttgctgtgtcctgcagcccctttccgggacacctgggttcacacagctttttagcttacataactggtgcagattttctgtgtggagatgttgccttgaccagccttggctggactttaccaggcatgcagaagcctgtaccaacacagactacagcacccaggaggtgcgagtgtggctgctcagcggttataacaggcctgactgcattgttcaccggattataatgagccaaaatgtttcccggtgtttgctggtttcagggaaggagtttgatatagcagattaaccaccctccttgtagctattggggcttaatggtttcctggtgattcttaccaatccacaataaacatggcccattggcatatctgcaaaaaaaaaaaaaaaaa

SEQ ID NO: 592 - DNA, 4982 bp, Homo sapiens
  ref <308>: DATABASE ACCESSION NUMBER: NCBI / NM_005786
  ref <309>: DATABASE ENTRY DATE: 2011-11-21
  ref <313>: RELEVANT RESIDUES IN SEQ ID NO: (1)..(4982)
agctcgatgtgtctgtctatcagttgagactgtctgaaagctctgcgatccgaatgtgtgttatatttcactgaaaagaggagagagcgagagtgcatctccctctctcccaggagtttgagggggggggggacagtccacgctcatctcgcccacccagtgaatgtctgctcttcaccccctttgcacacactctccgggttgttgttgccttttttttttcttggaggggggggtgctttttgtgtatttttcaaatttttttctgttggaagatcaagaccggccaaaaatccatgatcaaaatgtgtttgcattagatttcgcattggaagaagcggcgatcctggcggccaagccccccgggtggaagcgcggggcaccaagtggcgctccggcggggtgacactgtttgatctgtgactgtttggaaggtggagcagcgcctgacatctccccccggcgcatcttatgttcctgaggaagaattgaaggcagcagaaatagatgaagagcacgtggaggatgacgggctgtctttggacattcaggaaagtgagtacatgtgcaatgaagagacggagatcaaagaggcgcagagctaccagaactccccagtcagctctgcgactaaccaggacgccggctacgggtcgcccttcagtgagagcagcgaccagctagcccatttcaaaggctcttcctctcgagaagagaaggaggatccgcagtgtcccgacagcgtctcgtacccccaggacagcctggcacagatcaaagctgtgtatgcaaacttgttctccgagtcctgctggtccagcttagctctggatttaaagaagtcgggttccaccaccagcaccaacgatgccagccagaaggagagctccgcccccacccccacaccccccacctgccccgtcagcaccactggccccaccacgagcacgcccagcaccagctgcagctccagcaccagccacagcagtaccaccagtaccagcagcagctccgggtacgactggcaccaggctgcactggccaagacgctgcagcagacgtcctcgtatgggctgcttcctgagcccagcctgttcagcaccgtgcagctctaccgccagaacaacaagctctacggctccgtcttcacgggcgccagcaagttccggtgcaaagactgcagtgccgcgtacgacacgctggtggaactgacggtgcacatgaacgagacaggccactaccgtgacgacaacagggacaaggactccgagaagaccaagaggtggtccaagcccaggaagcgctccctgatggagatggaggggaaggaggatgcccagaaggtgctgaagtgcatgtactgtggacactcctttgagtccttgcaggacctcagcgtccacatgatcaaaaccaagcattaccagaaagtgcctctgaaggagccagtgccagccatcaccaaactggtcccctccaccaaaaagcgggcgcttcaggacctggcgcccccctgctcccctgagccagcaggaatggccgcagaggtggccctgagtgagtcagccaaggatcagaaagcagcgaacccgtacgtcacgcccaataaccgctatggctaccagaatggcgccagctacacctggcagtttgaggcccgcaaggcgcagatcctcaagtgcatggagtgtggcagctcccacgacacgctgcagcagctcaccgcccacatgatggtcaccgggcacttcctgaaagtgaccacctcggcttctaagaagggcaagcagttggtgctggaccctgtggtggaagagaagatccagtccatcccactaccgcccaccacccacacgcggctgccggcctccagcatcaaaaagcagcccgactctcccgcggggtccacgacttctgaagaaaagaaagagccagagaaggagaagccgcctgtggctggcgacgcggagaagatcaaggaggagagtgaggacagcttggagaaatttgagcccagcaccctgtacccgtacctgcgtgaggaggacctggacgacagccccaagggagggctggacattctcaagtccctggagaataccgtctccacggccattagcaaagctcagaatggtgcgccctcatggggtggctaccccagcatccatgcagcctaccagctcccgggcaccgtgaagccactgccggcggccgtgcagagcgtgcaggtgcagccgtcctatgctggcggcgtgaagtcgctgtcttccgccgagcacaacgccctcctgcactccccagggagcctcacgcccccaccgcacaagagcaacgtgtctgccatggaggagctggtggagaaggtcacgggcaaggtcaacatcaagaaggaggagagaccccctgagaaggagaagagctccctggccaaggctgcgtcccccatagcaaaagagaataaagatttcccgaaaacggaggaagtcagcggcaaaccacagaagaagggccctgaggccgagactgggaaggccaaaaaggagggaccgctggacgttcacaccccaaatggcacagagcctctcaaagcaaaggtcaccaacggctgtaacaacctggggatcatcatggaccactcaccggagccttccttcatcaacccgctgagcgctttgcagtccatcatgaacacccacctgggcaaggtgtccaagcccgtgagtccctcgctggacccgctggcgatgctgtacaagatcagcaacagcatgctggacaagccggtgtaccccgccacccctgtgaagcaggccgatgccatcgaccgctactattatgaaaacagcgaccagcccattgacttaaccaagtccaagaacaagccgctggtgtccagcgtggctgattcggtggcatcacctctgcgggagagcgcactcatggacatctccgacatggtgaaaaacctcacaggccgcctgacgcccaagtcctccacgccctccacagtttcagagaagtccgatgctgatggcagcagctttgaggaggcgttggacgagctgtcaccggtccacaagaggaagggccggcagtccaactggaacccgcagcaccttctcatcctgcaggcccagttcgcctcgagcttgcgggagaccacagagggcaagtacatcatgtcggacttgggcccgcaggagagggtgcacatctcgaagtttactgggctctccatgaccaccatcagccactggctggccaatgtgaagtaccagttgaggaggacagggggaacgaaattcctaaagaacctggacacagggcatcctgttttcttttgcaacgattgtgcctctcagttcagaactgcttctacatacataagtcatttggagacacacttgggcttcagcctgaaggatctctccaagctgccactcaatcagattcaagaacagcagaatgtttcgaaagtcctcaccaacaaaactctgggcccactgggggccaccgaggaagacttgggctccacattccaatgtaagctctgcaaccggacttttgcgagcaagcacgcagtcaaactgcaccttagtaagacccacggcaagtctcccgaggaccacctgatctatgtgactgagttggagaaacagtagcgtccaggtatgcaagagaccgcggaacattgcactaaacgtcgtcgagctgcactaggcctggcctgagcctctgaaatcagtctttcctttgttgctggcccgcctctctggaccttggttttcttacacatattttgtatatttatatgctctctgtccgatctgtgcatgttatttttctttttccgtgagtcaaagtctgacctttattttcaacatctgttcttggtgttaagctatcttttgtaggaaatagtggggcacactactcagagacattatttagcagtaaagaaagacacaaataacaatgataaaaagacatcctaaaatggtgaagttgccatgacaataaaggtcatagaacctggtagtgtcaaatttaaccctttgaggactgtaattgcatttctgtgcctttcacttgaaaaaaaaaaaagaagaaaaaaaggcttaaaggcatttcattcagatcaaaagctgtgtcagacacaaaacttatttaataattaaaaaatgagcttttatatgcagaactggtttgtgaggaaacatgcatgcagctgtgggaagatagaaagctgtctaggactcacggggttcggaagccacacctctacatgtctaaaacaaaaaacaacaacaacagataccccactcgccactatgcccaaaccctctggatgctgaaaaatgccactttcggcaaaaaaaaaagtatgcaagctattatttaaaaatgtgtaaaaatgctatttcttttttcctgtaaaatattgcagtttatagttatttacaaatgtaagctttggtacaagctgacctttctatagcgtgctgcattggtaaatgaaaaaaaatggggcaaacgttggagtcctttccttgtaaattgccagcatcagcttaaaaactcctgtatgttacatatcgtaccattttaatctcttcaactttctttgtaccttctggctgtatgctttctcttttaactttttatattgtcattttatattaaatttctgtgtatataatgtaaaaccacaatttttgaataaaatttagttcctgcagcttgatttaaatagaggacttttactggcacctgcatctctccagatgcatgtactcagagggactgtcagacaaaaataaatacataaaaacaaagcaagcaatgcactattaattatacattttgatgttctatcattaatattgtacagtacattttggttcacacaattaaatccactgttttctcagatgtaaaataaacccacatgcagttcttgatttacaaaaaaaaaaaaaaaa

SEQ ID NO: 593 - DNA, 719 bp, Homo sapiens
  ref <308>: DATABASE ACCESSION NUMBER: NCBI / NM_007104
  ref <309>: DATABASE ENTRY DATE: 2011-11-21
  ref <313>: RELEVANT RESIDUES IN SEQ ID NO: (1)..(719)
agtctcttttccggttagcgcggcgtgagaagccatgagcagcaaagtctctcgcgacaccctgtacgaggcggtgcgggaagtcctgcacgggaaccagcgcaagcgccgcaagttcctggagacggtggagttgcagatcagcttgaagaactatgatccccagaaggacaagcgcttctcgggcaccgtcaggcttaagtccactccccgccctaagttctctgtgtgtgtcctgggggaccagcagcactgtgacgaggctaaggccgtggatatcccccacatggacatcgaggcgctgaaaaaactcaacaagaataaaaaactggtcaagaagctggccaagaagtatgatgcgtttttggcctcagagtctctgatcaagcagattccacgaatcctcggcccaggtttaaataaggcaggaaagttcccttccctgctcacacacaacgaaaacatggtggccaaagtggatgaggtgaagtccacaatcaagttccaaatgaagaaggtgttatgtctggctgtagctgttggtcacgtgaagatgacagacgatgagcttgtgtataacattcacctggctgtcaacttcttggtgtcattgctcaagaaaaactggcagaatgtccgggccttatatatcaagagcaccatgggcaagccccagcgcctatattaaggcacatttgaataaattctattaccagttc

SEQ ID NO: 594 - DNA, 2989 bp, Homo sapiens
  ref <308>: DATABASE ACCESSION NUMBER: NCBI / NM_005762
  ref <309>: DATABASE ENTRY DATE: 2012-01-01
  ref <313>: RELEVANT RESIDUES IN SEQ ID NO: (1)..(2989)
ggcgcgcgggcgagcggttgtgcttgtgcttgtggcgcgtggtgcgggtttcggcggcggctgaggaagaagcgcgggcggcgccttcgggaggcgagcaggcagcagttggccgtgccgtagcagcgtcccgcgcgcggcgggcagcggcccaggaggcgcgtggcggcgctcggcctcgcggcggcggcggcggcagcggcccagcagttggcggcgagcgcgtctgcgcctgcgcggcgggccccgcgcccctcctccccccctgggcgcccccggcggcgtgtgaatggcggcctccgcggcggcagcctcggcagcagcggcctcggccgcctctggcagcccgggcccgggcgagggctccgctggcggcgaaaagcgctccaccgccccttcggccgcagcctcggcctctgcctcagccgcggcgtcgtcgcccgcggggggcggcgccgaggcgctggagctgctggagcactgcggcgtgtgcagagagcgcctgcgacccgagagggagccccgcctgctgccctgtttgcactcggcctgtagtgcctgcttagggcccgcggcccccgccgccgccaacagctcgggggacggcggggcggcgggcgacggcaccgtggtggactgtcccgtgtgcaagcaacagtgcttctccaaagacatcgtggagaattatttcatgcgtgatagtggcagcaaggctgccaccgacgcccaggatgcgaaccagtgctgcactagctgtgaggataatgccccagccaccagctactgtgtggagtgctcggagcctctgtgtgagacctgtgtagaggcgcaccagcgggtgaagtacaccaaggaccatactgtgcgctctactgggccagccaagtctcgggatggtgaacgtactgtctattgcaacgtacacaagcatgaaccccttgtgctgttttgtgagagctgtgatactctcacctgccgagactgccagctcaatgcccacaaggaccaccagtaccagttcttagaggatgcagtgaggaaccagcgcaagctcctggcctcactggtgaagcgccttggggacaaacatgcaacattgcagaagagcaccaaggaggttcgcagctcaatccgccaggtgtctgacgtacagaagcgtgtgcaagtggatgtcaagatggccatcctgcagatcatgaaggagctgaataagcggggccgtgtgctggtcaatgatgcccagaaggtgactgaggggcagcaggagcgcctggagcggcagcactggaccatgaccaagatccagaagcaccaggagcacattctgcgctttgcctcttgggctctggagagtgacaacaacacagcccttttgctttctaagaagttgatctacttccagctgcaccgggccctcaagatgattgtggatcccgtggagccacatggcgagatgaagtttcagtgggacctcaatgcctggaccaagagtgccgaggcctttggcaagattgtggcagagcgtcctggcactaactcaacaggccctgcacccatggcccctccaagagccccagggcccctgagcaagcagggctctggcagcagccagcccatggaggtgcaggaaggctatggctttgggtcaggagatgatccctactcaagtgcagagccccatgtgtcaggtgtgaaacggtcccgctcaggtgagggcgaggtgagcggccttatgcgcaaggtgccacgagtgagccttgaacgcctggacctggacctcacagctgacagccagccacccgtcttcaaggtcttcccaggcagtaccactgaggactacaaccttattgttattgaacgtggcgctgccgctgcagctaccggccagccagggactgcgcctgcaggaacccctggtgccccacccctggctggcatggccattgtcaaggaggaggagacggaggctgccattggagcccctcctactgccactgagggccctgagaccaaacctgtgcttatggctcttgcggagggtcctggtgctgagggtccccgcctggcctcacctagtggcagcaccagctcagggctggaggtggtggctcctgagggtacctcagccccaggtggtggcccgggaaccctggatgacagtgccaccatttgccgtgtctgccagaagccaggcgatctggttatgtgcaaccagtgtgagttttgtttccacctggactgtcacctgccggccctgcaggatgtaccaggggaggagtggagctgctcactctgccatgtgctccctgacctgaaggaggaggatggcagcctcagcctggatggtgcagacagcactggcgtggtggccaagctctcaccagccaaccagcggaaatgtgagcgtgtactgctggccctattctgtcacgaaccctgccgccccctgcatcagctggctaccgactccaccttctccctggaccagcccggtggcaccctggatctgaccctgatccgtgcccgcctccaggagaagttgtcacctccctacagctccccacaggagtttgcccaggatgtgggccgcatgttcaagcaattcaacaagttaactgaggacaaggcagacgtgcagtccatcatcggcctgcagcgcttcttcgagacgcgcatgaacgaggccttcggtgacaccaagttctctgctgtgctggtggagcccccgccgatgagcctgcctggtgctggcctgagttcccaggagctgtctggtggccctggtgatggcccctgaggctggagcccccatggccagcccagcctggctctgttctctgtcctgtcaccccatccccactcccctggtggcctgactcccactccctggtggccccatcccccagttcctcacgatatggtttttacttctgtggatttaataaaaacttcaccagttaaaaaaaaaaaaaaaaaaaaaaaaaaaaaa

SEQ ID NO: 595 - DNA, 2172 bp, Homo sapiens
  ref <308>: DATABASE ACCESSION NUMBER: NCBI / NM_012138
  ref <309>: DATABASE ENTRY DATE: 2011-11-19
  ref <313>: RELEVANT RESIDUES IN SEQ ID NO: (1)..(2172)
aatcccttcaaccttctgcgcgcttccgccttcatgctagcaacgcccgcagtgacgcgcaggccccgccccctcccgcgcgcctcccggaagtggccggtccagagctgtggggtggcctccgcgcggtctctggcggagtcggggaatcggatcaaggcgagaggatccggcagggaaggagcttcggggccgggggttgggccgcacatttacgtgcgcgaagcggagtggaccgggagctggtgacgatggcggggccgcagcccctggcgctgcaactggaacagttgttgaacccgcgaccaagcgaggcggaccctgaagcggaccccgaggaagccactgctgccagggtgattgacaggtttgatgaaggggaagatggggaaggtgatttcctagtagtgggtagcattagaaaactggcatcagcctccctcttggacacggacaaaaggtattgcggcaaaaccacctctagaaaagcatggaatgaagaccattgggagcagactctgccaggatcgtctgatgaggaaatatctgatgaggaagggtctggagatgaagattcagagggactgggtctggaggaatatgatgaggacgacctgggtgctgctgaggaacaggagtgtggtgatcacagggagagcaagaagagcagaagccactctgcaaaaacaccgggcttcagtgtccagagtatcagtgactttgagaaatttaccaagggaatggatgaccttgggagcagtgaggaggaggaagacgaagagagtggcatggaagaaggggatgacgcggaagactcccaaggcgagagtgaggaagacagggctggagatagaaacagtgaggatgatggtgtggtgatgaccttctctagtgtcaaagtttctgaggaagtggagaaaggaagagccgtgaagaaccagatagcactgtgggaccagctcttggaaggaaggatcaaactacaaaaagctctgttgaccaccaaccagcttcctcaaccagatgttttcccattgttcaaggacaaaggtggcccagaattttccagtgccctgaaaaatagtcacaaggcacttaaagcattgttgaggtcattggtaggtcttcaggaagagttgcttttccagtacccagacactagatatctagtagatgggacaaagcccaatgcgggaagtgaggagatttctagtgaagatgatgagctggtagaagagaagaagcagcaacgaagaagggtccctgcaaagaggaagctggagatggaggactatcccagcttcatggcaaagcgctttgccgactttacagtctacaggaaccgcacacttcagaaatggcacgataagaccaaactggcttctggaaaactggggaagggttttggtgcctttgaacgctcaatcttgactcagatcgaccatattctgatggacaaagagagattacttcgaaggacacagaccaagcgctctgtctatcgagttcttggcaaacctgagccagcagctcagcctgtcccagagagtttgccaggggaaccggagatccttcctcaagcccctgctaatgctcatctgaaggacttggatgaagaaatctttgatgatgatgacttttaccaccagctccttcgagaactcatagaacggaagaccagctccttggatcccaacgatcaggtggccatgggaaggcagtggcttgcaatccagaagttacgaagcaaaatccacaaaaaagtagataggaaagccagcaaaggcaggaaacttcggtttcatgtccttagcaagctactgagtttcatggcacctattgaccatactacaatgaatgatgatgccaggacagaactgtaccgctctctttttggccagctccaccctcccgacgaaggccacggggattgacatcgcccacctccgacacccagtgggcgccttggctggtgcggctgctggtccagatggaggaaaccagtgactttatggggctgagctagtagggaagcccctggaaagatgctgcgttccgaacctgtgcctaatacacgcaagggcgctgtcccgcccaaccccgcctttaaacgccacaaataaagagcattgttaccgccaaaaaaaaaaaaaaaaaaaaaaaaaaaaaaaa

SEQ ID NO: 596 - DNA, 5252 bp, Homo sapiens
  ref <308>: DATABASE ACCESSION NUMBER: NCBI / NM_015318
  ref <309>: DATABASE ENTRY DATE: 2011-09-24
  ref <313>: RELEVANT RESIDUES IN SEQ ID NO: (1)..(5252)
ctcgcgcggcttcccgcttccggctcccagctgctagctactgtggatctgggggggccggacggaggcatcggaggcggctgcgagagtggcagaggagctggcggagagcggcctgcgggcgatcgggccgagcctcgctcaaggagcacccccggggcaccctcctgtccgatggcagcccggccctgtccaggaatgtcggtatgacggtctctcagaaagggggtccccagccaacaccgagcccggctggccctgggacgcaactcggaccaatcacaggagagatggatgaagccgattctgcgtttttaaaatttaagcagacagctgatgactctctgtcccttacatctccaaacaccgagtccatttttgtagaagatccctacaccgcctcgctgaggagtgagattgagtcagacggccacgagtttgaagctgagtcctggagcctcgccgtggatgcagcctacgccaagaagcaaaagagggaggtggtgaaaagacaagatgtcctttatgagctgatgcagacagaggtgcaccacgtgcggacgctcaagatcatgctgaaggtgtactccagggccctgcaggaggagctgcagttcagcagcaaggccattggccgcctcttcccatgcgctgacgacctgctggagacgcacagccacttcctcgctcggctcaaggagcgccgccaggagtccctggaggagggcagtgaccggaattatgtcatccagaaaatcggcgacctcctggttcagcagttttcaggtgaaaatggggagagaatgaaagaaaagtacggtgtgttttgtagtggccacaatgaagctgttagtcattacaagttgctgcttcagcaaaacaagaaatttcaaaacttgatcaagaaaattggcaacttctccatcgtgcggcggcttggcgtgcaggagtgcattctcctggttacacaacgcataaccaaatacccagtgctggtggagcgcatcatccagaacacggaagctggcactgaggactatgaagacctgacccaggccttgaacctcatcaaagatatcatctcacaagtggacgccaaggtcagtgagtgtgagaagggccagcgcctcagggagatcgcagggaagatggacctgaagtcttccagcaaactcaagaacgggctcaccttccgcaaggaagacatgcttcagcggcagctccacctggagggcatgctatgctggaagaccacatcagggcgcttgaaagatatcctggctatcctgctgaccgacgtacttttgctgctacaagaaaaagatcagaaatacgtctttgcttctgtggactcaaagccacccgtcatctcgttacaaaagctcatcgtgagggaagtggccaacgaggagaaagcgatgtttctgatcagcgcctccttgcaagggccggagatgtatgaaatctacacgagctccaaagaggacaggaacgcctggatggcccacatccaaagggctgtggagagctgccctgacgaggaggaggggcccttcagcctgcccgaagaggaaaggaaggtggtcgaggcccgcgccacgagactccgggactttcaagagcggttgagcatgaaagaccagctgatcgcacagagcctcctagagaaacagcagatctacctggagatggccgagatgggcggcctcgaagacctgccccagccccgaggcctattccgtggaggggacccatccgagaccctgcagggggagctaattctcaagtcggccatgagcgagatcgagggcatccagagcctgatctgcaggcagctgggcagcgccaacggccaggcggaagacggaggcagctccacaggcccgcccaggagggctgagaccttcgcgggctacgactgcacaaacagccccaccaagaatggcagtttcaagaagaaagtcagcagcactgaccccaggccccgagactggcgaggccccccaaacagcccggacttgaagctcagtgacagtgacattcctgggagctctgaggaatcgccgcaggtggtggaggcgccaggcacggaatccgatccccgtctgcccaccgtcctggagtcggagcttgtccagcggatccagacactgtcccagctgctcctgaaccttcaggcggtaatcgcccaccaggacagctatgtggagacgcagcgggctgccatccaggagcgggagaagcagttccggctgcagtcgacgcgtgggaacctgctgctggagcaggagcggcaacgcaacttcgagaagcagcgggaggagcgcgcggccctggagaagctgcagagccagctgcggcacgagcagcagcgctgggagcgcgagcgccagtggcagcaccaggagctggagcgtgcgggcgcgcggctgcaggagcgcgagggcgaggcgcggcagctacgcgagcggctggagcaggagcgggccgagctggagcgccagcgccaggcctaccagcacgacctggagcggctgcgcgaggcccagcgtgccgtggagcgcgagcgggagcgcctggagctgctgcgccgcctcaagaagcagaacaccgcgccaggcgcgctgccgcccgacacactggccgaggcccagcccccaagccaccctcccagcttcaacggggaagggctggagggccctcgtgtgagcatgctgccatccggcgtggggccagagtacgcagagcgccccgaggtggctcgccgggacagcgcccccaccgagaaccggctggccaagagcgatgtgcccatccagctgctcagcgccaccaaccagttccagaggcaggcggccgtgcagcagcagatccccaccaagctggcggcctccaccaagggtggcaaggacaagggcggcaagagcaggggctctcagcgctgggagagctcagcgtccttcgacctgaagcagcagctgctgctcaacaagctcatggggaaagatgagagcacctcacggaaccgccgctcgctgagccctatcctgcccggcagacacagtcctgcgcccccaccagaccctggcttccccgccccgagcccaccgccagctgacagcccctccgagggcttctctctcaaggccgggggcacagccctcctgcccgggcccccagctccctcgccactgccggccacaccactcagcgccaaggaggacgccagcaaagaagacgtcatcttcttctaaaagggccgtgactcaaggaaagtttttaatggaaagttgagccagaactaaaccagggagctgtctgaaatcatagcaccccatccgggtggcggggagatcaactccgagctgtttttccgaggcagtgaggaacggtgccggctctgcacggagctgaggacaggacagaccttgctttgagaaggagctgccggccggggccacgctccacagccgccgcgcgacagtggagccaagggttagggcaccaggaggggccaggtggcgtcggcagcatctgtccccagaatcaggcagaatccacttcccaaacagagccccacgcaggttcaccatgaacctcagggtcagggaatgagccaggcacgggggcatgggcagagagggccacggggcagggcccactgagggaacatcagtggccctccagtcaggttctgtgggtttggaagcccatcgtgaaaggggctgacctttgcccctttttacttggcattggttttgaaaccagctgtttcccaaactctgcttcccaagggcaaccgttgctgttcacacgctcagcctgtctgggggagcgggcctctagcttcagccagggcgggtacacaccctgggcacagggtcctcagcccccgggaaatgagctcccagggctggcgtcccaccttccaggtgggggctggcacatcacagactgtcgagagcgccatgtcccagggcatgcagaggatgcacctagagacgttgcagcaagtggacaagtggccgctgtgcgggcccctcgcttgtagtgagctgttgcagcttacggtccgttccctggaggggtggaggaaggaggtgttgggcagcatcaaaggtgctgggacatcccagggtggtgagatccatccacgatccagctccggtggagaaagggcccatgtcaagccttgttctgcaccccaagcattggtggtaggactgggtcctggctgatcgtccttgttcccagtggggtacatgtgagcccctgccagggccaagtccttctcccgaacccagggtcctgggaactgcagatcccggggggattcagcccttctcccactgtgctggcagaggcactcctgtgacgctgaatacagtgaacagggacattcccgccactcggggacagatgggcacaagggaggggaaactccatcaggaagtgctcccctgggcagaggcgcccactgggtgctgtgggctcaggagggggcggggcaggagctggtgccaaccgggaaccagagccccacagccatacagcccattggtgacaaggtcctgagaacacagtggccaggtgtccccaggctcctggcccctccgacgacctcaactctgcccagcccggtccctggccatcagcgacgctgtccgccccccgtcagatcccatgtgtgccatgtttatcatcagtgttttgtatttttgtactgagtatcggagcactttacagaagctgactgtacattcctgttctgttgtgaagagaacattcccagaccctggcaccctcctgagccggcgtgtgccggtccagccctccgagatgccacaattccttggatgggggagaagttcaaggaatttctgctcggccacgcggtgggaaccccgcgtccccgccatgtggcagaggggtctcagtcgtgctaggcatcgggcggcagcgccgacagcccttccctcgccagtgcccctcggccactcctgggttggagcccgattttatttgtaaagttgacagtcgagcaaatgttcctattttcgtgggatctgcacacgtctttgtcagttgtggtcatgatcttagtcacctgctaattatttttacaatgattacaacatttcctcactgcgggatatttctgacccgctttagaacttaagacctgattctagcaataaacgtgtccgagatgagcggtgaaaaaaaaaaaaaaaaaaaaaaaaaaaaaaaaa

SEQ ID NO: 597 - DNA, 1142 bp, Homo sapiens
  ref <308>: DATABASE ACCESSION NUMBER: NCBI / NM_012423
  ref <309>: DATABASE ENTRY DATE: 2011-11-20
  ref <313>: RELEVANT RESIDUES IN SEQ ID NO: (1)..(1142)
cttttccaagcggctgccgaagatggcggaggtgcaggtcctggtgcttgatggtcgaggccatctcctgggccgcctggcggccatcgtggctaaacaggtactgctgggccggaaggtggtggtcgtacgctgtgaaggcatcaacatttctggcaatttctacagaaacaagttgaagtacctggctttcctccgcaagcggatgaacaccaacccttcccgaggcccctaccacttccgggcccccagccgcatcttctggcggaccgtgcgaggtatgctgccccacaaaaccaagcgaggccaggccgctctggaccgtctcaaggtgtttgacggcatcccaccgccctacgacaagaaaaagcggatggtggttcctgctgccctcaaggtcgtgcgtctgaagcctacaagaaagtttgcctatctggggcgcctggctcacgaggttggctggaagtaccaggcagtgacagccaccctggaggagaagaggaaagagaaagccaagatccactaccggaagaagaaacagctcatgaggctacggaaacaggccgagaagaacgtggagaagaaaattgacaaatacacagaggtcctcaagacccacggactcctggtctgagcccaataaagactgttaattcctcatgcgttgcctgcccttcctccattgttgccctggaatgtacgggacccaggggcagcagcagtccaggtgccacaggcagccctgggacataggaagctgggagcaaggaaagggtcttagtcactgcctcccgaagttgcttgaaagcactcggagaattgtgcaggtgtcatttatctatgaccaataggaagagcaaccagttactatgagtgaaagggagccagaagactgattggagggccctatcttgtgagtggggcatctgttggactttccacctggtcatatactctgcagctgttagaatgtgcaagcacttggggacagcatgagcttgctgttgtacacagggtatttctagaagcagaaatagactgggaagatgcacaaccaaggggttacaggcatcgcccatgctcctcacctgtattttgtaatcagaaataaattgcttttaaagaaaaaaaaaaaaaaaaaa

SEQ ID NO: 598 - DNA, 925 bp, Homo sapiens
  ref <308>: DATABASE ACCESSION NUMBER: NCBI / NM_021128
  ref <309>: DATABASE ENTRY DATE: 2011-11-24
  ref <313>: RELEVANT RESIDUES IN SEQ ID NO: (1)..(925)
agtctgggacgcgccgccgccatgatcatccctgtacgctgcttcacttgtggcaagatcgtcggcaacaagtgggaggcttacctggggctgctgcaggccgagtacaccgagggggatgcgctggatgccctgggcctgaagcgctactgctgccgccggatgctgctggcccacgtggacctgatcgagaagctgctcaattatgcacccctggagaagtgaccacgctggaacccacccacccgctgtgctgaccatgggccctgagcgtcctgccccgaattcacgaggctgaggcatccgggagctggcgtaatgcctggccgcagtgtgtgtgtatccgataccccactctggaaggaaccatccagtaaaggtctttcagaaccactaaggtcccagccctcactaggatgtcaggagccaggtctaggcccagctttcacactgtggcagcccagtgaagcagactgggccatgaactctcctagccctggggccagcctgttccacaggcacccctgcaggaggcgctgccaggagagccttccatctcggggctctttgaggttccctccttctgggtgttcttcaggctgagcagagaggctcctgtaccctctctctcggaatctgaagagccagatttaggccgggcaaaggggctcacccctataatcccaggactttgggaggccaaggcaggaggatcacttgagtccagaaattcaagacccgcctgggcatcataatgagaccccatctctacaacaaaatttaataaattagctgggcacagtgttcacacctgtagtcccggccactcggggctgaggcaggaggatcactggaacctgggaggttgccactgcaaaaaaaaaaaaaaaaaaaaaaaaaaaaaaaaaaaaaaaaaaaaaaaaaa

SEQ ID NO: 599 - DNA, 909 bp, Homo sapiens
  ref <308>: DATABASE ACCESSION NUMBER: NCBI / NM_032635
  ref <309>: DATABASE ENTRY DATE: 2011-09-25
  ref <313>: RELEVANT RESIDUES IN SEQ ID NO: (1)..(909)
cagaaggtcgcgcgcgggcccccgccagtcaggtgggtgccaggccctggccgtggcgaaagagccggcggagccggagacccgctcccggagacgccgcctcgcgatccccgcgcgggcgggaccgggcggccggcatcatgaccctgtttcacttcgggaactgcttcgctcttgcctacttcccctacttcatcacctacaagtgcagcggcctgtccgagtacaacgccttctggaaatgcgtccaggctggagtcacctacctctttgtccaactctgcaagatgctgttcttggccactttctttcccacctgggaaggcggcatctatgacttcattggggagttcatgaaggccagcgtggatgtggcagacctgataggtctaaaccttgtcatgtcccggaatgccggcaagggagagtacaagatcatggttgctgccctgggctgggccactgctgagcttattatgtcccgctgcattcccctatgggtcggagcccggggcattgagtttgactggaagtacatccagatgagcatagactccaacatcagtctggtccattacatcgtcgcgtctgctcaggtctggatgataacacgctatgatctgtaccacaccttccggccagctgtcctcctgctgatgttcctcagtgtctacaaggcctttgttatggagaccttcgtccacctctgctcgctgggcagttgggcagctctactggcccgagcagtggtaacggggctgctggccctcagcactttggccctgtatgtcgccgttgtcaatgtgcactcctaggcttggtgtctcagacattgatgtaccttttccctgcctcactccaggttttagtgaagtaaacagtatttggaaagttgaaaaaaaaaaaaaa

SEQ ID NO: 600 - DNA, 1820 bp, Homo sapiens
  ref <308>: DATABASE ACCESSION NUMBER: NCBI / NM_005080
  ref <309>: DATABASE ENTRY DATE: 2011-12-18
  ref <313>: RELEVANT RESIDUES IN SEQ ID NO: (1)..(1820)
ggcgctgggcggctgcggcgcgcggtgcgcggtgcgtagtctggagctatggtggtggtggcagccgcgccgaacccggccgacgggacccctaaagttctgcttctgtcggggcagcccgcctccgccgccggagccccggccggccaggccctgccgctcatggtgccagcccagagaggggccagcccggaggcagcgagcggggggctgccccaggcgcgcaagcgacagcgcctcacgcacctgagccccgaggagaaggcgctgaggaggaaactgaaaaacagagtagcagctcagactgccagagatcgaaagaaggctcgaatgagtgagctggaacagcaagtggtagatttagaagaagagaaccaaaaacttttgctagaaaatcagcttttacgagagaaaactcatggccttgtagttgagaaccaggagttaagacagcgcttggggatggatgccctggttgctgaagaggaggcggaagccaaggggaatgaagtgaggccagtggccgggtctgctgagtccgcagcactcagactacgtgcacctctgcagcaggtgcaggcccagttgtcacccctccagaacatctccccatggattctggcggtattgactcttcagattcagagtctgatatcctgttgggcattctggacaacttggacccagtcatgttcttcaaatgcccttccccagagcctgccagcctggaggagctcccagaggtctacccagaaggacccagttccttaccagcctccctttctctgtcagtggggacgtcatcagccaagctggaagccattaatgaactaattcgttttgaccacatatataccaagcccctagtcttagagataccctctgagacagagagccaagctaatgtggtagtgaaaatcgaggaagcacctctcagcccctcagagaatgatcaccctgaattcattgtctcagtgaaggaagaacctgtagaagatgacctcgttccggagctgggtatctcaaatctgctttcatccagccactgcccaaagccatcttcctgcctactggatgcttacagtgactgtggatacgggggttccctttccccattcagtgacatgtcctctctgcttggtgtaaaccattcttgggaggacacttttgccaatgaactctttccccagctgattagtgtctaaggaatgatccaatactgttgcccttttccttgactattacactgcctggaggatagcagagaagcctgtctgtacttcattcaaaaagccaaaatagagagtatacagtcctagagaattcctctatttgttcagatctcatagatgacccccaggtattgtcttttgacatccagcagtccaaggtattgagacatattactggaagtaagaaatattactataattgagaactacagcttttaagattgtacttttatcttaaaagggtggtagttttccctaaaatacttattatgtaagggtcattagacaaatgtcttgaagtagacatggaatttatgaatggttctttatcatttctcttccccctttttggcatcctggcttgcctccagttttaggtcctttagtttgcttctgtaagcaacgggaacacctgctgagggggctctttccctcatgtatacttcaagtaagatcaagaatcttttgtgaaattatagaaatttactatgtaaatgcttgatggaattttttcctgctagtgtagcttctgaaaggtgctttctccatttatttaaaactacccatgcaattaaaaggtacaatgca

SEQ ID NO: 601 - DNA, 4622 bp, Homo sapiens
  ref <308>: DATABASE ACCESSION NUMBER: NCBI / NM_006389
  ref <309>: DATABASE ENTRY DATE: 2011-11-26
  ref <313>: RELEVANT RESIDUES IN SEQ ID NO: (1)..(4622)
aatgagcgcgcgccgcgtccggggccggctggtgcgcgagacgccgccgagaggttggtggctaatgtaacagtttgcaaaccgagaggagttgtgaagggcgcgggtggggggcgctgccggcctcgtgggtacgttcgtgccgcgtctgtcccagagctggggccgcaggagcggaggcaagaggggcactatggcagacaaagttaggaggcagaggccgaggaggcgagtctgttgggccttggtggctgtgctcttggcagacctgttggcactgagtgatacactggcagtgatgtctgtggacctgggcagtgagtccatgaaggtggccattgtcaaacctggagtgcccatggaaattgtcttgaataaggaatctcggaggaaaacaccggtgatcgtgaccctgaaagaaaatgaaagattctttggagacagtgcagcaagcatggcgattaagaatccaaaggctacgctacgttacttccagcacctcctggggaagcaggcagataacccccatgtagctctttaccaggcccgcttcccggagcacgagctgactttcgacccacagaggcagactgtgcactttcagatcagctcgcagctgcagttctcacctgaggaagtgttgggcatggttctcaattattctcgttctctagctgaagattttgcagagcagcccatcaaggatgcagtgatcaccgtgccagtcttcttcaaccaggccgagcgccgagctgtgctgcaggctgctcgtatggctggcctcaaagtgctgcagctcatcaatgacaacaccgccactgccctcagctatggtgtcttccgccggaaagatattaacaccactgcccagaatatcatgttctatgacatgggctcaggcagcaccgtatgcaccattgtgacctaccagatggtgaagactaaggaagctgggatgcagccacagctgcagatccggggagtaggatttgaccgtaccctggggggcctggagatggagctccggcttcgagaacgcctggctgggcttttcaatgagcagcgcaagggtcagagagcaaaggatgtgcgggagaacccgcgtgccatggccaagctgctgcgtgaggctaatcggctcaaaaccgtcctcagtgccaacgctgaccacatggcacagattgaaggcctgatggatgatgtggacttcaaggcaaaagtgactcgtgtggaatttgaggagttgtgtgcagacttgtttgagcgggtgcctgggcctgtacagcaggccctccagagtgccgaaatgagtctggatgagattgagcaggtgatcctggtgggtggggccactcgggtccccagagttcaggaggtgctgctgaaggccgtgggcaaggaggagctggggaagaacatcaatgcagatgaagcagccgccatgggggcagtgtaccaggcagctgcgctcagcaaagcctttaaagtgaagccatttgtcgtccgagatgcagtggtctaccccatcctggtggagttcacgagggaggtggaggaggagcctgggattcacagcctgaagcacaataaacgggtactcttctctcggatggggccctaccctcaacgcaaagtcatcacctttaaccgctacagccatgatttcaacttccacatcaactacggcgacctgggcttcctggggcctgaagatcttcgggtatttggctcccagaatctgaccacagtgaagctaaaaggggtgggtgacagcttcaagaagtatcctgactacgagtccaagggcatcaaggctcacttcaacctggatgagagtggcgtgctcagtctagacagggtggagtctgtatttgagacactggtagaggacagcgcagaagaggaatctactctcaccaaacttggcaacaccatttccagcctgtttggaggcggtaccacaccagatgccaaggagaatggtactgatactgtccaggaggaagaggagagccctgcagaggggagcaaggacgagcctggggagcaggtggagctcaaggaggaagctgaggccccagtggaggatggctctcagcccccaccccctgaacctaagggagatgcaacccctgagggagaaaaggccacagaaaaagaaaatggggacaagtctgaggcccagaaaccaagtgagaaggcagaggcagggcctgagggcgtcgctccagccccagagggagagaagaagcagaagcccgccaggaagcggcgaatggtagaggagatcggggtggagctggttgttctggacctgcctgacttgccagaggataagctggctcagtcggtgcagaaacttcaggacttgacactccgagacctggagaagcaggaacgggaaaaagctgccaacagcttggaagcattcatatttgagacccaggacaagctgtaccagcccgagtaccaggaagtgtccacagaggagcagcgtgaggagatctctgggaagctcagcgccgcatccacctggctggaggatgagggtgttggagccaccacagtgatgttgaaggagaagctggctgagctgaggaagctgtgccaagggctgttttttcgggtagaggagcgcaagaagtggcccgaacggctgtctgccctcgataatctcctcaaccattccagcatgttcctcaagggggcccggctcatcccagagatggaccagatcttcactgaggtggagatgacaacgttagagaaagtcatcaatgagacctgggcctggaagaatgcaactctggccgagcaggctaagctgcccgccacagagaagcctgtgttgctctcaaaagacattgaagctaagatgatggccctggaccgagaggtgcagtatctgctcaataaggccaagtttaccaagccccggccccggcctaaggacaagaatgggacccgggcagagccacccctcaatgccagtgccagtgaccagggggagaaggtcatccctccagcaggccagactgaagatgcagagcccatttcagaacctgagaaagtagagactggatccgagccaggagacactgagcctttggagttaggaggtcctggagcagaacctgaacagaaagaacaatcgacaggacagaagcggcctttgaagaacgacgaactataacccccacctctgttttccccattcatctccacccccttcccccaccacttctatttatttaacatcgagggttgggggaggggttggtcctgccctcggctggagttcctttctcacccctgtgatttggaggtgtggagaaggggaagggagggacagctcactggttccttctgcagtacctctgtggttaaaaatggaaactgttctcctccccagccccactccctgttccctacccatataggccctaaatttgggaaaaatcactattaatttctgaatcctttgcctgtgggtaggaagagaatggctgccagtggctgatgggtcccggtgatgggaagggtatcaggttgctggggagtttccactcttctctggtgattgttccttccctcccttcctctcccaccatgcgatgagcatcctttcaggccagtgtctgcagagcctcagttaccaggtttggtttctgagtgcctatctgtgctctttcctccctctgcgggcttctcttgctctgagcctcccttccccattccccatccagctcctttccccctgggtttccttggcttcctgcagcaaattgggcagttctctgccccttgcctaaaagcctgtacctctggattggcggaagtaaatctggaaggattctcactcgtatttcccacccctagtggccagaggagggaggggcacagtgaagaagggagcccaccacctctccgaagaggaaagccacgtagagtggttggcatggggtgccagcatcgtgcaagctctgtcataatctgcatcttcccagcagcctggtaccccaggttcctgtaactccctgcctcctcctctcttctgctgttctgctcctcccagacagagcctttccctcaccccctgaccccctgggctgaccaaaatgtgctttctactgtgagtccctatcccaagatcctggggaaaggagagaccatggtgtgaatgtagagatgccacctccctctctctgaggcaggcctgtggatgaaggaggagggtcagggctggccttcctctgtgcatcactctgctaggttgggggcccccgacccaccatacctacgcctagggagcccgtcctccagtattccgtctgtagcaggagctagggctgctgcctcagctccaagacaagaatgaacctggctgtgtcagtcattttgtcttttccttttttttttttttttgccacattggcagagatgggacctaagggtcccacccctcaccccacccccacctcttctgtatgtttgaattctttcagtagctgttgatgctggttggacaggtttgagtcaaattgtactttgctccattgttaattgagaaactgtttcaataaaatattcttttctacagttaaaaaaaaaaaaaaaaaaaa

SEQ ID NO: 602 - DNA, 723 bp, Homo sapiens
  ref <308>: DATABASE ACCESSION NUMBER: NCBI / NM_024112
  ref <309>: DATABASE ENTRY DATE: 2011-11-09
  ref <313>: RELEVANT RESIDUES IN SEQ ID NO: (1)..(723)
ccggcctctgggcggagatctgctgccgcgttctacccttccggcccgtgttctatccgccgcctccaccttccatccggcgccggctttcggcgcgacggtcgccgcgttccatcgtcgcgcggcccttcgggcgcccgagcccgcaatgtcgggccccaacggagacctggggatgccggtggaggcgggagcggaaggcgaggaggacggcttcggggaagcagaatacgctgccatcaactccatgctggaccagatcaactcctgtctggaccacctggaggagaagaatgaccacctccacgcccgcctccaggagctgctggagtccaaccggcagacacgcctggagttccagcagcagctcggggaggcccccagtgatgccagcccctaggctccaagagcccccaaccgggacccaaccctgcctccctgggctaggctctggcctgggcactcaccccctggcttagacaccttctcaagggctggccttcagggacccctggtgggtctgcctgcctgggccacccttcctgcctgggcctccccttggcctacctgggccagcccccaccacctggcatgccctcctggggccaagagtgggcctgcaacccacccacttgcctgcccacccaactcctgggcgctccccactctgcccaggccttgagtgtccacattaaatgggtctcccacaccgcaaaaaaaaaa

SEQ ID NO: 603 - DNA, 1472 bp, Homo sapiens
  ref <308>: DATABASE ACCESSION NUMBER: NCBI / NM_006817
  ref <309>: DATABASE ENTRY DATE: 2011-11-27
  ref <313>: RELEVANT RESIDUES IN SEQ ID NO: (1)..(1472)
gagcctcctggggtgtccacgtgagcgcgcgtgagtccgcccccccagtcacgtgaccgctgactcggggcgttctccactatcgcttacctacctccctctgcaggaacccggcgatatggctgccgctgtgccccgcgccgcatttctctccccgctgcttccccttctcctgggcttcctgctcctctccgctccgcatggcggcagcggcctgcacaccaagggcgcccttcccctggatacggtcactttctacaaggtcattcccaaaagcaagttcgtcttggtgaagttcgacacccagtacccctacggtgagaagcaggatgagttcaagcgtcttgctgaaaactcggcttccagcgatgatctcttggtggcagaggtggggatctcagattatggtgacaagctgaacatggagctgagtgagaaatacaagctggacaaagagagctacccagtcttctacctcttccgggatggggactttgagaacccagtcccatacactggggcagttaaggttggagccatccagcgctggctgaaggggcaaggggtctacctaggtatgcctggttgcctgcctgtatacgacgccctggccggggagttcatcagggcctctggtgtggaggcccgccaggccctcttgaagcaggggcaagataacctctcaagtgtgaaggagactcagaagaagtgggccgagcaatacctgaagatcatggggaagatcttagaccaaggggaggacttcccagcatcagagatgacacggatcgccaggctgattgagaagaacaagatgagtgacgggaagaaggaggagctccagaagagcttaaacatcctgactgccttccagaagaagggggccgagaaagaggagctgtaaaaaggctgtctgtgattttccagggtttggtgggggtagggaggggagagttaacctgctggctgtgagtcccttgtggaatataagggggtagtgggaaaagtggtactaacccacgattctgagccctgagtatgcctggacattgatgctaacatgaccatgcttgggatgtctctagctggtctggggatagctggagcacttactcaggtggctggtgaaatgacacctcagaaggaatgagtgctatagagaggagagaggagtgtactgcccaggtctttgacagatgtaattctcattcaattaaagtttcagtgttttggttaagtggacctgaagccattcttttttcttttcaaattatactttcgtctatgacctgctttcctctttgaatctaagctggtatagactccactttcccagggtaacaaactatcctcataacactgtggaaactggcatacctttgttattttccagtgatattcagactgacatggattgactgtcaatggtaaagtttgtctattttccagtccttaaaactcaatagcagtat

SEQ ID NO: 604 - DNA, 2844 bp, Homo sapiens
  ref <308>: DATABASE ACCESSION NUMBER: NCBI / NM_022830
  ref <309>: DATABASE ENTRY DATE: 2011-12-18
  ref <313>: RELEVANT RESIDUES IN SEQ ID NO: (1)..(2844)
gtttccggaggagtgtgtccgcgcaattgaacgactttatgtcacttcctatcggatcggcggaagttgcttccgagcgcgttgagctttggcgaagtgggttccggtggtggcagaggtgcttgtgtttttgtcggtacaggagagtcgctatggcggcggtggattcggatgtcgaatcgctgccgcgtggggggttccgctgctgcctctgccacgttactacagccaaccgacccagccttgatgcccacttgggaggcagaaagcaccggcacctggtagaactacgagctgcgagaaaggcccagggacttcgaagtgtgtttgtcagtggctttcccagggatgtggattctgctcagctctctgagtacttcctagcatttggacctgtggccagtgttgtcatggacaaggacaagggagtgtttgccattgtggagatgggggacgtgggtgctcgagaggctgtcttgtcacagtcccagcacagcctgggaggacatcgcctgcgtgtccgcccacgggagcagaaggagttccagagcccggcctccaaatcccccaaaggagcggcccccgacagtcaccagctggccaaagcgctagctgaggctgcagacgtgggggcacaaatgataaagcttgtggggctgagggagttgtccgaggccgagcggcagcttcgcagcctagtggtggccctgatgcaggaggtcttcacagagttcttccctggctgtgtggtccacccttttggctcttccataaatagcttcgatgtccatggctgtgatcttgacctcttcttggatctgggtgacttggaagagccccagccagtcccaaaggctccagaatctccatcgctggactcggccctggcttccccactggaccctcaagccctggcctgcaccccagcttcccctccagattcacaacctcctgcttctccccaggattctgaagccctggactttgaaaccccttcctcctccctggcgccccaaactccggactctgccttggcctccgagacccttgcttctccccagtctctgcctccagcttcaccactgctagaggacagggaagagggggacctggggaaggcctcggaactagcagagaccccaaaggaggagaaagcagagggggcagcaatgctggagctggtgggatccattctccggggctgtgtccctggggtgtatcgagtccaaactgtgccctctgcccggcgccctgtggtcaagttctgtcatcggccttcaggtctccacggtgatgtctccctcagtaaccggctggccctgcataactcccgtttcctgagtctctgctctgagctggatggtcgagtccggcccctcgtgtacaccctccgctgctgggctcagggtcgggggctgtcagggagtggcccccttctcagtaactacgccctgaccttgctggtgatctattttcttcagaccagggaccctcctgtgttgcccactgtgtcccagctcacccagaaagcaggagagggggaacaggtggaagtcgatggctgggactgcagtttccccagggatgcctcaagactggagcccagcataaatgtggagcccctcagttccctgctagcccagttcttctcctgtgtatcttgttgggatcttcgtggctccctgctgtccctgcgggagggtcaggcactgcctgtggcagggggcctgccttctaatctctgggagggtctgcgccttggccccctgaatctccaggacccttttgacctgagtcacaatgtcgcagccaatgtgaccagccgggtggctgggcgcctacagaactgctgccgagcagcagccaattactgccgaagcctccagtaccagcgccgttcctcccggggtcgggactgggggctgctccctcttctgcagcccagctcccccagctccctgctctctgctacgccgatccctttaccccttgcacccttcacccagctcactgctgccctggtgcaggtattcagggaagcactggggtgccatatagaacaggcaaccaagagaacgcggtcagaaggaggtggaactggggagtcctctcagggagggacaagcaaaagactcaaagtagatggacagaaaaactgctgtgaggaggggaaagaggagcagcagggatgtgcaggggacggtggggaagacagggtagaagagatggttatagaggttggagagatggtgcaggactgggccatgcagagccctgggcagccaggggacctgcccctgaccactggaaagcatggagcccctggagaagaggggcagcccagccacgcagccctggcagagcgggggcccaagggacatgaggcagcccaagaatggtctcagggtgaggcagggaagggggcatccctgccctcctcagcgagctggcgctgtgccttgtggcaccgagtgtggcaagggcggcggcgagcccgtagacgcttgcagcagcaaaccaaggagggagctggaggtggcgctggcacaagagcagggtggctggcgactgaggctcaggtcacccaggagctgaaaggactgagtggtggcgaagagaggccagaaactgagcccctgctgagctttgtggcgtctgtctccccggctgaccgaatgctcactgtgaccccgctccaggatccccaaggcctgttccctgatctccatcatttcttacaggttttcctccctcaagcaattcgacatctcaagtgaagacatggcccctgaagggcaataaagctgctagtttattaatacagtcaaaaaaaaaaaaaaaaaa

SEQ ID NO: 605 - DNA, 2200 bp, Homo sapiens
  ref <308>: DATABASE ACCESSION NUMBER: NCBI / NM_019884
  ref <309>: DATABASE ENTRY DATE: 2011-12-18
  ref <313>: RELEVANT RESIDUES IN SEQ ID NO: (1)..(2200)
cccaagccagagcggcgcggcctggaagaggccagggcccgggggaggcggcggcagcggcggcggctggggcagcccgggcagcccgagccccgcagcctgggcctgtgctcggcgccatgagcggcggcgggccttcgggaggcggccctgggggctcgggcagggcgcggactagctcgttcgcggagcccggcggcggaggcggaggaggcggcggcggccccggaggctcggcctccggcccaggcggcaccggcggcggaaaggcatctgtcggggccatgggtgggggcgtcggggcctcgagctccgggggtggacccggcggcagcggcggaggaggcagcggaggccccggcgcaggcactagcttcccgccgcccggggtgaagctgggccgtgacagcgggaaggtgaccacagtcgtagccactctaggccaaggcccagagcgctcccaagaagtggcttacacggacatcaaagtgattggcaatggctcatttggggtcgtgtaccaggcacggctggcagagaccagggaactagtcgccatcaagaaggttctccaggacaagaggttcaagaaccgagagctgcagatcatgcgtaagctggaccactgcaatattgtgaggctgagatactttttctactccagtggcgagaagaaagacgagctttacctaaatctggtgctggaatatgtgcccgagacagtgtaccgggtggcccgccacttcaccaaggccaagttgaccatccctatcctctatgtcaaggtgtacatgtaccagctcttccgcagcttggcctacatccactcccagggcgtgtgtcaccgcgacatcaagccccagaacctgctggtggaccctgacactgctgtcctcaagctctgcgattttggcagtgcaaagcagttggtccgaggggagcccaatgtctcctacatctgttctcgctactaccgggccccagagctcatctttggagccactgattacacctcatccatcgatgtttggtcagctggctgtgtactggcagagctcctcttgggccagcccatcttccctggggacagtggggtggaccagctggtggagatcatcaaggtgctgggaacaccaacccgggaacaaatccgagagatgaaccccaactacacggagttcaagttccctcagattaaagctcacccctggacaaaggtgttcaaatctcgaacgccgccagaggccatcgcgctctgctctagcctgctggagtacaccccatcctcaaggctctccccactagaggcctgtgcgcacagcttctttgatgaactgcgatgtctgggaacccagctgcctaacaaccgcccacttccccctctcttcaacttcagtgctggtgaactctccatccaaccgtctctcaacgccattctcatccctcctcacttgaggtccccagcgggcactaccaccctcaccccgtcctcacaagctttaactgagactccgaccagctcagactggcagtcgaccgatgccacacctaccctcactaactcctcctgagggccccaccaagcacccttccacttccatctgggagccccaagaggggctgggaaggggggccatagcccatcaagctcctgccctggctgggcccctagactagagggcagaggtaaatgagtccctgtccccacctccagtccctccctcaccagcctcacccctgtggtgggctttttaagaggattttaactggttgtggggagggaagagaaggacagggtgttggggggatgaggacctcctacccccttggccccctcccctcccccagacctccacctcctccagaccccctcccctcctgtgtcccttgtaaatagaaccagcccagcccgtctcctcttcccttccctggcccccgggtgtaaatagattgttataatttttttcttaaagaaaacgtcgattcgcaccgtccaacctggccccgcccctcctacagctgtaactcccctcctgtcctctgcccccaaggtctactccctcctcaccccaccctggagggccaggggagtggagagagctcctgatgtcttagtttccacagtaaggtttgcctgtgtacagacctccgttcaataaattattggcatgaaaacctgaaaaaaaaaaaaaaaaaaaaa

SEQ ID NO: 606 - DNA, 1094 bp, Homo sapiens
  ref <308>: DATABASE ACCESSION NUMBER: NCBI / NM_021107
  ref <309>: DATABASE ENTRY DATE: 2011-08-14
  ref <313>: RELEVANT RESIDUES IN SEQ ID NO: (1)..(1094)
agctggattcagcgtgtccgcgacctcacctttaggtcctgtgaggtcggtggaatcctggggtcctccaaatctaccaggccatctccccagtttcccagttcttcctgcgtgcgggcgagagtggttgggccctcgggaacccactcagagcgaggctaaatttacggagggactttctgttagcagcatgagggcctgtggttagacctatagaggtatttcctttgatttaagccagaaagtcctgagagcggatcggggagcatttgcggatcggtcactttttcctcctttctgagtctcttatcccctaccacagggacggcccaggtggcaggatgtcctggtctggccttctccatggcctcaacacgtccctaacttgtggcccagctctggttccccggctctgggctacctgctccatggctaccctgaaccagatgcaccgcctggggccccccaagcggccgcctcggaagctgggccccacggaaggccggccgcagctgaagggtgtggtcctgtgcacgtttacccgcaagccgaagaagcccaactcagccaatcgcaagtgctgtcgagtgcggctcagcactggccgcgaggccgtctgcttcatccctggggagggccacaccctgcaggagcaccagattgtccttgtggagggcggccgcacccaggacctgccaggcgtcaagctcaccgttgtgcgtggcaagtacgactgtggccacgtgcagaagaagtgacggctgggggcacagtgggctgggcgcccctgcagaacatgaaccttccgctcctggctgccacagggtcctccgatgctggcctttgcgcctctagaggcagccactcatggattcaagtcctggctccgcctcttccatcaggaccactattaagccataggagtcctgggggtgcaaagggtgcccctctgtcaacacccttggctcctgtgtttagaggggtggcctgaaggaccttttctgctgggacaagacactgtactgccctctgctgggaaggggttttaataaacagaccctggcgcttgtgatgtaaaaaaaaaaaaaaaaaaa

SEQ ID NO: 607 - DNA, 937 bp, Homo sapiens
  ref <308>: DATABASE ACCESSION NUMBER: NCBI / NM_021074
  ref <309>: DATABASE ENTRY DATE: 2011-12-18
  ref <313>: RELEVANT RESIDUES IN SEQ ID NO: (1)..(937)
gcgtgccgtccgggtcgcctaggcctggggtcgggagcgcgcacgctgtgcgccctgggcgcgctcgggattctcgcctggcgcggctggggaaggtgaacagtgtggcccgccatgttcttctccgcggcgctccgggcccgggcggctggcctcaccgcccactggggaagacatgtaaggaatttgcataagacagttatgcaaaatggagctggaggagctttatttgtgcacagagatactcctgagaataaccctgatactccatttgatttcacaccagaaaactataagaggatagaggcaattgtaaaaaactatccagaaggccataaagcagcagctgttcttccagtcctggatttagcccaaaggcagaatgggtggttgcccatctctgctatgaacaaggttgcagaagttttacaagtacctccaatgagagtatatgaagtagcaactttttatacaatgtataatcgaaagccagttggaaagtatcacattcaggtctgcactactacaccctgcatgcttcgaaactctgacagcatactggaggccattcagaaaaagcttggaataaaggttggggagactacacctgacaaacttttcactcttatagaagtggaatgtttaggggcctgtgtgaacgcaccaatggttcaaataaatgacaattactatgaggatttgacagctaaggatattgaagaaattattgatgagctcaaggctggcaaaatcccaaaaccagggccaaggagtggacgcttctcttgtgagccagctggaggtcttacctctttgactgaaccacccaagggacctggatttggtgtacaagcaggcctttaatttatattgaactgtaaatatgtcactagagaaataaaatatggacttccaatctacgtaaacttaaaaaaaa

SEQ ID NO: 608 - DNA, 5179 bp, Homo sapiens
  ref <308>: DATABASE ACCESSION NUMBER: NCBI / NM_014944
  ref <309>: DATABASE ENTRY DATE: 2011-11-11
  ref <313>: RELEVANT RESIDUES IN SEQ ID NO: (1)..(5179)
acctctactggggagacgaggaccccgaggttctggggggcgacgcgacctgcccgaagtgacaagggtcctgggccgcactgctccgccggggtctgcgctcctcggcggagcgggtgggaaggatgagtcctcggggtggagaaggaggagcgggtccccgggtaccgctcacccggccttaggagcccgggagcgcgcgtagggacgcggagttgaggctctccatctgcggccagggaaagggatacagtcccccgggcccctcccggccgctcggaacccaccccaggcgcgtccccgcgggcgcgcgctccaggcggggccgacgggctcggaggcgcgcgcccgctgccgggtccgccgcgcgcgctccctccgctcctctcccccgcccctcccgggcccgcgcgctcccagggtccgccgcgcgcgcgcctcgcgtcgctccccatccccgcccctcccgccgccaccccgcccccggccgggtaccctcgccggacccgagagagagcgccgccgccatcttagttgctgccgctgccttcagcaagacgctgctctgaggcggggagggcgccgcgtcctgagcgcgcggcccagcgtcacggcggcggcggcggcggctcctccttggacccccggagctccccgcgccgcggagcagctggccccaggcccctagagccccgagagctccgagagctccgctcggcgtcccgcgcgcctccctgccgctcccgccccgggctggcgatgctgcgccgccccgctcccgcgctggccccggccgcccggctgctgctggccgggctgctgtgcggcggcggggtctgggccgcgcgagttaacaagcacaagccctggctggagcccacctaccacggcatagtcacagagaacgacaacaccgtgctcctcgaccccccactgatcgcgctggataaagatgcgcctctgcgatttgcaggtgagatttgtggatttaaaattcacgggcagaatgtcccctttgatgcagtggtagtggataaatccactggtgagggagtcattcgctccaaagagaaactggactgtgagctgcagaaagactattcattcaccatccaggcctatgattgtgggaagggacctgatggcaccaacgtgaaaaagtctcataaagcaactgttcatattcaggtgaacgacgtgaatgagtacgcgcccgtgttcaaggagaagtcctacaaagccacggtcatcgaggggaagcagtacgacagcattttgagggtggaggccgtggatgccgactgctcccctcagttcagccagatttgcagctacgaaatcatcactccagacgtgccctttactgttgacaaagatggttatataaaaaacacagagaaattaaactacgggaaagaacatcaatataagctgaccgtcactgcctatgactgtgggaagaaaagagccacagaagatgttttggtgaagatcagcattaagcccacctgcacccctgggtggcaaggatggaacaacaggattgagtatgagccgggcaccggcgcgttggccgtctttccaaatatccacctggagacatgtgacgagccagtcgcctcagtacaggccacagtggagctagaaaccagccacatagggaaaggctgcgaccgagacacctactcagagaagtccctccaccggctctgtggtgcggccgcgggcactgccgagctgctgccatccccgagtggatccctcaactggaccatgggcctgcccaccgacaatggccacgacagcgaccaggtgtttgagttcaacggcacccaggcagtgaggatcccggatggcgtcgtgtcggtcagccccaaagagccgttcaccatctcggtgtggatgagacatgggccattcggcaggaagaaggagacaattctttgcagttctgataaaacagatatgaatcggcaccactactccctctatgtccacgggtgccggctgatcttcctcttccgtcaggatccttctgaggagaagaaatacagacctgcagagttccactggaagttgaatcaggtctgtgatgaggaatggcaccactacgtcctcaatgtagaattcccgagtgtgactctctatgtggatggcacgtcccacgagcccttctctgtgactgaggattacccgctccatccatccaagatagaaactcagctcgtggtgggggcttgctggcaagagttttcaggagttgaaaatgacaatgaaactgagcctgtgactgtggcctctgcaggtggcgacctgcacatgacccagtttttccgaggcaatctggctggcttaactctccgttccgggaaactcgcggataagaaggtgatcgactgtctgtatacctgcaaggaggggctggacctgcaggtcctcgaagacagtggcagaggcgtgcagatccaagcacaccccagccagttggtattgaccttggagggagaagacctcggggaattggataaggccatgcagcacatctcgtacctgaactcccggcagttccccacgcccggaattcgcagactcaaaatcaccagcacaatcaagtgttttaacgaggccacctgcatttcggtccccccggtagatggctacgtgatggttttacagcccgaggagcccaagatcagcctgagtggcgtccaccattttgcccgagcagcttctgaatttgaaagctcagaaggggtgttccttttccctgagcttcgcatcatcagcaccatcacgagagaagtggagcctgaaggggacggggctgaggaccccacagttcaagaatcactggtgtccgaggagatcgtgcacgacctggatacctgtgaggtcacggtggagggagaggagctgaaccacgagcaggagagcctggaggtggacatggcccgcctgcagcagaagggcattgaagtgagcagctctgaactgggcatgaccttcacaggcgtggacaccatggccagctacgaggaggttttgcacctgctgcgctatcggaactggcatgccaggtccttgcttgaccggaagtttaagctcatctgctcagagctgaatggccgctacatcagcaacgaatttaaggtggaggtgaatgtaatccacacggccaaccccatggaacacgccaaccacatggctgcccagccacagttcgtgcacccggaacaccgctcctttgttgacctgtcaggccacaacctggccaacccccacccgttcgcagtcgtccccagcactgcgacagttgtgatcgtggtgtgcgtcagcttcctggtgttcatgattatcctgggggtatttcggatccgggccgcacatcggcggaccatgcgggatcaggacaccgggaaggagaacgagatggactgggacgactctgccctgaccatcaccgtcaaccccatggagacctatgaggaccagcacagcagtgaggaggaggaggaagaggaagaggaagaggaaagcgaggacggcgaagaagaggatgacatcaccagcgccgagtcggagagcagcgaggaggaggagggggagcagggcgacccccagaacgcaacccggcagcagcagctggagtgggatgactccaccctcagctactgacccgtgcccccggccacctcggtttctgctttcgaagactctgctgccatccgttctcccagtcccaagggtccacgatgtacaaagtcatttcggccagtaggtgtgcagacccctccccgccacgatcgtcgctgtgcttggtgtgtaggaccctaggctccccgcccaccctctgcctggtcgcgctcttcagtcccacgaggagctgacacgtcctctctggccgccatccggctcgcacaggggcctcccagcgcctcaggccccgcgtttgtgtctggagtctccccccggggagaggacactggcccctcgcactccagaaaagccatgccagctgggctcgttgacaaagggtaaaacatgctcactcccacccggtaatcatttttttctttttttaaaaaaagtttttattttttccaaactagtgcatgtataaataatggcaggatggggggtactgtgtagatgattaactgactttttaatattttgtaaataaatcggattccttgtgtcctttgtgctagtgtaacccgggactggaatgtaaagtgaagttcggagctctgagcacgggctcttcccgccgggtcctccctccccagaccccagagggagaggcccaccccgcccagccccgccccagcccctgctcaggtctgagtatggctgggagtcgggggccacaggcctctagctgtgctgctcaagagactggatcagggtagctacaagtggccgggccttgcctttgggattctacctgttcctaatttggtgtggggtgcggggtccctggccccttttccacactcctcctccgacagcagctccctgggcagtggcctggtctcaccgtgtgcagccttgtggtttatgcttaaatgtacattttcctgctggtaaaaggagaaactgagaggtgtcctgcagaccggctgaccactccttttggagacggcaggaggcctgagcgatccgtactcagaacgtccaggagagacgcatggcccgaagtcaaagtgctggaattttccaaaacagcctgttctctcctctctcctccccagagcaccccctgccatcaggggggttgaaatccctctcccccaggagccctgctgctttgcttggtggtagggcaggagagcaaacaaacagtcatggtctaaaacccacatagcactttgctcttagttacatgtaaaattttagatttctaaaacaggtgggcaatcattttgaatactgttctgtgaccctgactgctagttctgaggacactggtggctgtgctatgtgtggccatcctccatgtcccgtccctgtagctgctctgtttagacagcggacagacgctcacgcccaggggatgtcctcacgctgtcgccgcgcggtttcccttcgcagatgtgtatactcatgataggtcagaaagtgtatccgctacaataaagttctggttctaactaactccaaaaaaaaaaaaaaaaaa

SEQ ID NO: 609 - DNA, 2182 bp, Homo sapiens
  ref <308>: DATABASE ACCESSION NUMBER: NCBI / NM_014764
  ref <309>: DATABASE ENTRY DATE: 2011-12-24
  ref <313>: RELEVANT RESIDUES IN SEQ ID NO: (1)..(2182)
cggaccctcccgcggccgactggaggcccggagcaggggcggagtttccggcggcagcgccactcgggcgtcgggtgacgctaggcggacggaccatcatgtgacacggaagtagctccgaacaggaagaggacgaaaaaaataaccgtccgcgacgccgagacaaaccggacccgcaaccaccatgaacagcaaaggtcaatatccaacacagccaacctaccctgtgcagcctcctgggaatccagtataccctcagaccttgcatcttcctcaggctccaccctataccgatgctccacctgcctactcagagctctatcgtccgagctttgtgcacccaggggctgccacagtccccaccatgtcagccgcatttcctggagcctctctgtatcttcccatggcccagtctgtggctgttgggcctttaggttccacaatccccatggcttattatccagtcggtcccatctatccacctggctccacagtgctggtggaaggagggtatgatgcaggtgccagatttggagctggggctactgctggcaacattcctcctccacctcctggatgccctcccaatgctgctcagcttgcagtcatgcagggagccaacgtcctcgtaactcagcggaaggggaacttcttcatgggtggttcagatggtggctacaccatctggtgaggaaccaaggccacctctgtgccgggaaagacatcacataccttcagcacttctcacaatgtaactgctttagtcatattaacctgaagttgcagtttagacacatgttgttggggtgtctttctggtgcccaaactttcaggcacttttcaaatttaataaggaaccatgtaatggtagcagtacctccctaaagcattttgaggtaggggaggtatccattcataaaatgaatgtgggtgaagccgccctaaggattttcctttaatttctctggagtaatactgtaccatactggtctttgcttttagtaataaaacatcaaattaggtttggagggaactttgatcttcctaagaattaaagttgccaaattattctgattggtctttaatctcctttaagtctttgatatatattacttgttataaatggaacgcattagttgtctgccttttcctttccatcccttgccccacccatcccatctccaaccctagtcttccatttcctcccgccagtctccattgaatcaatggtgcaggacagaaagccagtcagactaatttccttctttcctcgcacttctccccactcgtcatcttttaactagtgtttcacaaggatcctctgaaaccctctctgtgccccaagtacagatgccattacttctgctttcgtatctcctcaggcaaaagtggagggtgccttatgggccctcctcataggttgtctctgcatacacgaacctaacccaaatttgctttggtgccagaaaaactgagctatgtttgaacaaagatgtcgtgcaaactgtactgtgaacaacagttggtttaaaatatgaggggcaaggaggaggatgcatttcaaaagcttgattgatgtgttcagagctaaattaagaggagttttcagatcaaaaactggttaccattttttgtcagagtgtctgatgcggccactcattcggctccccagaattcctagactgggttaatagggtcatattgtgaatgtctcactacaaaatgacttgagtccagtgaaatctcattagggtttaagaatatttcagggatccttaatgttttgatttttgttttctgaaattggattttattttattttatcttataatttcagttcatctaaattgtgtgttctgtacatgtgatgtttgactgtaccattgactgttatggaagttcagcgttgtatgtctctctctacactgtggtgcacttaacttgtggaatttttatactaaaaatgtagaataaagactattttgaagatttgaataaagtgatgaagttgcattacacctcactgcaaggattctttacttagcttgtttttagatttcttctatatatattttatttatatcccatctagaattcagctaggtgctgctgctgctctgtttcctttgatgacgctttgaaataaaggcaggagtacaagcctaaaaaaaaaaaaaaaaaa

SEQ ID NO: 610 - DNA, 1780 bp, Homo sapiens
  ref <308>: DATABASE ACCESSION NUMBER: NCBI / NM_015343
  ref <309>: DATABASE ENTRY DATE: 2011-12-18
  ref <313>: RELEVANT RESIDUES IN SEQ ID NO: (1)..(1780)
gaaacccagctgcagaggctgcagccccggtccccagcggctaaaggacccccgagctcggggagggggaggccgctccggcccagcgctctgcgccctccggctccccctccccctccttccctgctccttcgctctgcaggtctcggaggaccccatcctagccctacctgtctcggcccgcaacctccccgaagccgtcggtgccactcccagcccatgtgggcccccgcgggctgcccacgcctgtcccccagctccccgttccgctgggctttaccctcgccaggggtggctttctgagccgcccgctccgtgcccctctctgcagcctctcctgccactcggggcccccgttccccctcccggcggcggggggctgcccccggggggctggcggagctgggccgcgggggccccggggccggcggtgccggggtcatcgggatgatgcggacgcagtgtctgctggggctgcgcacgttcgtggccttcgccgccaagctctggagcttcttcatttaccttctgcggaggcagatccgcacggtaattcagtaccaaactgttcgatatgatatcctccccttatctcctgtgtcccggaatcggctagcccaggtgaagaggaagatcctggtgctggatctggatgagacacttattcactcccaccatgatggggtcctgaggcccacagtccggcctggtacgcctcctgacttcatcctcaaggtggtaatagacaaacatcctgtccggttttttgtacataagaggccccatgtggatttcttcctggaagtggtgagccagtggtacgagctggtggtgtttacagcaagcatggagatctatggctctgctgtggcagataaactggacaatagcagaagcattcttaagaggagatattacagacagcactgcactttggagttgggcagctacatcaaggacctctctgtggtccacagtgacctctccagcattgtgatcctggataactccccaggggcttacaggagccatccagacaatgccatccccatcaaatcctggttcagtgaccccagcgacacagcccttctcaacctgctcccaatgctggatgccctcaggttcaccgctgatgttcgttccgtgctgagccgaaaccttcaccaacatcggctctggtgacagctgctccccctccacctgagttggggtgggggggaaagggagggcgagcccttgggatgccgtctgatgccctgtccaatgtgaggactgcctgggcagggtctgcccctcccacccctctctgccctgggagccctacactccacttggagtctggatggacacatgggccaggggctctgaagcagcctcactcttaacttcgtgttcacactccatggaaaccccagactgggacacaggcggaagcctaggagagccgaatcagtgtttgtgaagaggcaggactggccagagtgacagacatacggtgatccaggaggctcaaagagaagccaagtcagctttgttgtgatttgattttttttaaaaaactcttgtacaaaactgatctaattcttcactcctgctccaagggctgggctgtgggtgggatactgggattttgggccactggattttccctaaatttgtcccccctttactctccctctatttttctctccttagactccctcagacctgtaaccagctttgtgtcttttttccttttctctcttttaaaccatgcattataactttgaaaccaaagcgg

SEQ ID NO: 611 - DNA, 835 bp, Homo sapiens
  ref <308>: DATABASE ACCESSION NUMBER: NCBI / NM_014420
  ref <309>: DATABASE ENTRY DATE: 2011-11-12
  ref <313>: RELEVANT RESIDUES IN SEQ ID NO: (1)..(835)
cagacgacgtgctgagctgccagcttagtggaagctctgctctgggtggagagcagcctcgctttggtgacgcacagtgctgggaccctccaggagccccgggattgaaggatggtggcggccgtcctgctggggctgagctggctctgctctcccctgggagctctggtcctggacttcaacaacatcaggagctctgctgacctgcatggggcccggaagggctcacagtgcctgtctgacacggactgcaataccagaaagttctgcctccagccccgcgatgagaagccgttctgtgctacatgtcgtgggttgcggaggaggtgccagcgagatgccatgtgctgccctgggacactctgtgtgaacgatgtttgtactacgatggaagatgcaaccccaatattagaaaggcagcttgatgagcaagatggcacacatgcagaaggaacaactgggcacccagtccaggaaaaccaacccaaaaggaagccaagtattaagaaatcacaaggcaggaagggacaagagggagaaagttgtctgagaacttttgactgtggccctggactttgctgtgctcgtcatttttggacgaaaatttgtaagccagtccttttggagggacaggtctgctccagaagagggcataaagacactgctcaagctccagaaatcttccagcgttgcgactgtggccctggactactgtgtcgaagccaattgaccagcaatcggcagcatgctcgattaagagtatgccaaaaaatagaaaagctataaatatttcaaaataaagaagaatccacattgcaaaaaaaaaaaaaaaaaa

SEQ ID NO: 612 - DNA, 2838 bp, Homo sapiens
  ref <308>: DATABASE ACCESSION NUMBER: NCBI / NM_005884
  ref <309>: DATABASE ENTRY DATE: 2011-12-17
  ref <313>: RELEVANT RESIDUES IN SEQ ID NO: (1)..(2838)
agccccggatgttcgttggggattcaacatggcggcgggagtgtccgcggtggtggcggtgcaagagagctgagggaggcgcgagggcgcggagttccaggtcgagcagttaggccgcgagcgactgcggcgccgagccgatgagtaacccgaagcccctagaggagtggtcacctgcctgagggcacttctgtcccaccagcatcagaccaggccgcaccgagtccccggcaccatgtttgggaagaggaagaagcgggtggagatctccgcgccgtccaacttcgagcaccgcgtgcacacgggcttcgaccagcacgagcagaagttcacggggctgccccgccagtggcagagcctgatcgaggagtcggctcgccggcccaagcccctcgtcgaccccgcctgcatcacctccatccagcccggggcccccaagaccatcgtgcggggcagcaaaggtgccaaagatggggccctcacgctgctgctggacgagtttgagaacatgtcggtgacacgctccaactccctgcggagagacagcccgccgccgcccgcccgtgcccgccaggaaaatgggatgccagaggagccggccaccacggccagagggggcccagggaaggcaggcagccgaggccggttcgccggtcacagcgaggcgggtggcggcagtggtgacaggcgacgggcggggccagagaagaggcccaagtcttccagggagggctcagggggtccccaggagtcctcccgggacaaacgccccctctccgggcctgatgtcggcaccccccagcctgctggtctggccagtggggcgaaactggcagctggccggccctttaacacctacccgagggctgacacggaccacccatcccggggtgcccagggggagcctcatgacgtggcccctaacgggccatcagcggggggcctggccatcccccagtcctcctcctcctcctcccggcctcccacccgagcccgaggtgcccccagccctggagtgctgggaccccacgcctcagagccccagctggcccctccagcctgcacccccgccgcccctgctgttcctgggccccctggcccccgctcaccacagcgggagccacagcgagtatcccatgagcagttccgggctgccctgcagctggtggtggacccaggcgacccccgctcctacctggacaacttcatcaagattggcgagggctccacgggcatcgtgtgcatcgccaccgtgcgcagctcgggcaagctggtggccgtcaagaagatggacctgcgcaagcagcagaggcgcgagctgctcttcaacgaggtggtaatcatgagggactaccagcacgagaatgtggtggagatgtacaacagctacctggtgggggacgagctctgggtggtcatggagttcctggaaggaggcgccctcaccgacatcgtcacccacaccaggatgaacgaggagcagatcgcggccgtgtgccttgcagtgctgcaggccctgtcggtgctccacgcccagggcgtcatccaccgggacatcaagagcgactcgatcctgctgacccatgatggcagggtgaagctgtcagactttgggttctgcgcccaggtgagcaaggaagtgccccgaaggaagtcgctggtcggcacgccctactggatggccccagagctcatctcccgccttccctacgggccagaggtagacatctggtcgctggggataatggtgattgagatggtggacggagagcccccctacttcaacgagccacccctcaaagccatgaagatgattcgggacaacctgccaccccgactgaagaacctgcacaaggtgtcgccatccctgaagggcttcctggaccgcctgctggtgcgagaccctgcccagcgggccacggcagccgagctgctgaagcacccattcctggccaaggcagggccgcctgccagcatcgtgcccctcatgcgccagaaccgcaccagatgaggcccagcgcccttcccctcaaccaaagagccccccgggtcacccccgccccactgaggccagtagggggccaggcctcccactcctcccagcccgggagatgctccgcgtggcaccaccctccttgctgggggtagatgagaccctactactgaactccagttttgatctcgtgacttttagaaaaacacagggactcgtgggagcaagcgaggctcccaggacccccaccctctgggacaggccctcccccatgttcttctgtctccaggaagggcagcggccctcccatcactggaagtctgcagtgggggtcgctgggggtggagagaacactaagaggtgaacatgtatgagtgtgtgcacgcgtgtgagtgtgcatgtgtgtgtgtgcaaaggtccagccaccccgtcctccagcctgcaaggggtgtctggcgccttgcctgacacccagccccctctccccctgagccattgtgggggtcgatcatgaatgtccgaagagtggccttttcccgtagccctgcgccccctttctgtggctggatggggagacaggtcagggccccccaccctctccagcccctgcagcaaatgactactgcacctggacagcctcctcttttctagaagtctatttatattgtcattttataacactctagcccctgcccttattgggggacagatggtccctgtcctgcggggtggccctggcagaaccactgcctgaagaaccaggttcctgcccggtcagcgcagccccagcccgcccacccctgcctcgagttagttttacaattaaaacattgtcttgttttgtg

SEQ ID NO: 613 - DNA, 2224 bp, Homo sapiens
  ref <308>: DATABASE ACCESSION NUMBER: NCBI / NM_012407
  ref <309>: DATABASE ENTRY DATE: 2011-11-13
  ref <313>: RELEVANT RESIDUES IN SEQ ID NO: (1)..(2224)
ctactaacagcgagcttccgccaatacttgttctcgttcttggttccgagcgtcccgggagccgggaagggaaggattgtctgcagggattggagcaaatatccagtggggggaaagccgggacttccgcgtcttgccggaagtgacgtgacaatcgcggccaccgccaggtggaacggcaggtgggttcaggtaccagcctggccgggacccggctgtgggaccaacgcttccggtgagcgacagaggcagctccccagggcctggagacccgtggggcggactctgggatctgagcctatcgccctggcctggagcccccctttgtacctattccccattcccctaccgagctgggcagttagccagcccactccaactctcggaaccatgtttgcagacttggattatgacatcgaagaggataaactcggaatcccgactgtgcctgggaaggtgaccctgcagaaggatgctcagaacctgatcgggatcagcattggaggaggggcccagtactgtccctgcctctatatcgtccaggtatttgacaacaccccagcagccttggacggcacagtggcagctggcgatgagatcaccggtgtcaatggcaggtcaatcaaagggaaaactaaggtggaggtggcgaagatgattcaggaggtgaagggggaggtgaccatccactacaacaagctgcaggcggaccccaagcagggcatgtccctggacattgtgttgaagaaagtcaagcaccggctggtggagaacatgagttcagggaccgcagatgctctgggcctgagccgggccatcctgtgcaatgatgggcttgtcaagaggctagaggagctggagcggaccgctgagctatacaaagggatgacggaacacaccaagaacctcctacgggccttttatgagctgtcgcagactcaccgggcctttggggacgtgttctccgtgatcggggtgcgggagccccagccagctgcgagcgaggcttttgtgaagttcgccgatgcccaccgcagcatcgagaagttcggcattcggcttctgaaaaccatcaagccgatgctgacggatctgaacacgtacctcaacaaagccatcccggacactcgcctcaccatcaagaagtacctggacgtgaagtttgagtacctgtcgtactgcctgaaggtgaaggagatggatgacgaggaatacagctgcattgccctaggcgagcccctttaccgggtgagcaccggcaactatgagtaccgcctgatcctgcgctgccgccaggaggcgcgcgcccgcttctcccagatgcgcaaggatgtgctggagaagatggagctgctggaccagaagcacgtccaggacatcgtgttccagctgcagcgcctcgtgtccaccatgtccaagtactacaacgactgctacgcagtgctgcgggatgccgacgtcttccccatcgaggtagacctggcgcacaccacattggcctatggcctcaaccaggaggagttcacagatggggaggaggaggaggaggaggaagacacggcagctggggagccgtccagggatacacgaggggctgctgggcccttggacaagggtggaagctggtgtgactcctgagtgccccgcggctgtggtgccgggggcagggtgcgtgggaggacggagcctgggagcggggcggggccgccgcgcaagggggcgacgcataaaggcctgctggcttggggcgcctgcctccctgctcctctgtcctcgcacagcgaacctgggctcctgcccaggacaggcaccagggtcatggcctgggacctggacactggcccctccaccctccctcccctcccggctccccggccagagggagagcttggtctctggacctgccttaggaaggagagggagggcaggaaggaaaagaaaggacttggaggtggcaggagtccgagccctgctccttgtgggcgctcacactgcccccggagcctgctgggagtggggccagccgtggacagctgaggttggggtcaatgcctcctgggcacccttgcctcgccccagaccggcccgtccagtccccatcacacctcggcggcctttatttattctgttcccccagctcggccacttctctgaaggagggctgggttctgggcctgtatcgaataaacacaaacctggatggcgcaaaaaaaaaaaaaaaaaa

SEQ ID NO: 614 - DNA, 1429 bp, Homo sapiens
  ref <308>: DATABASE ACCESSION NUMBER: NCBI / NM_012111
  ref <309>: DATABASE ENTRY DATE: 2011-08-09
  ref <313>: RELEVANT RESIDUES IN SEQ ID NO: (1)..(1429)
ggaagttaaggaggggagggggtggagggaaaagcaagccaggaggtgcttgcggccgcttctagtagtttccaggcgctgccgggcggctggcactaagcggtcctgaggctgtggctacggctgctccggagctggtggcgccgcgataggagagccgatggccaagtggggtgagggagacccacgctggatcgtggaggagcgggcggacgccaccaacgtcaacaactggcactggacggagagagatgcttcaaattggtccacggataagctgaaaacactgttcctggcagtgcaggttcaaaatgaagaaggcaagtgtgaggtgacggaagtgagtaagcttgatggagaggcatccattaacaatcgcaaagggaaacttatcttcttttatgaatggagcgtcaaactaaactggacaggtacttctaagtcaggagtacaatacaaaggacatgtggagatccccaatttgtctgatgaaaacagcgtggatgaagtggagattagtgtgagccttgccaaagatgagcctgacacaaatctcgtggccttaatgaaggaagaaggggtgaaacttctaagagaagcaatgggaatttacatcagcaccctcaaaacagagttcacccagggcatgatcttacctacaatgaatggagagtcagtagacccagtggggcagccagcactgaaaactgaggagcgcaaggctaagcctgctccttcaaaaacccaggccagacctgttggagtcaaaatccccacttgtaagatcactcttaaggaaaccttcctgacgtcaccagaggagctctatagagtgtttaccacccaagagctggtgcaggcctttacccatgctcctgcaacattagaagcagacagaggtggaaagttccacatggtagatggcaacgtctctggggaatttactgatctggtccctgagaaacatattgtgatgaagtggaggtttaaatcttggccagagggacactttgccaccatcaccttgaccttcatcgacaagaacggagagactgagctgtgcatggaaggtcgaggcatccctgctcctgaggaagagcggacgcgacagggctggcagcggtactactttgagggcattaaacagacctttggctatggcgcacgcttattttagggccagcggcaggggactccagcctgctggacacttcagtccagctctctcctgactggggcttgcgactcacaggattgcatcgtcccagctgctaacttggggccggggcccctcccttccacatataccttgggtttgtgcatgttttctgctgggtgggttcagagggcaatttctcttttatgtgtacatatgctaaataaacataatttaaaaaacaaaaaaaaaaaaaaaaaaaaaaaaaaaaaa

SEQ ID NO: 615 - DNA, 2622 bp, Homo sapiens
  ref <308>: DATABASE ACCESSION NUMBER: NCBI / NM_007144
  ref <309>: DATABASE ENTRY DATE: 2011-11-20
  ref <313>: RELEVANT RESIDUES IN SEQ ID NO: (1)..(2622)
tctcccctcccgccgcccgggcgagcgacacggctgcggcccccctcccctcccttccctccctccctcccatccccccctccccgagacccaccggaccccgaacccagatggccgaaacgggctccccgtcttaacgatttggcgtctccctcgaccaccacctctttgtgcagcagcccccgggcagaccctgttccgagggcaacgctccccagtccccccacccccgaccccggaatcatgcatcggactacacggatcaaaatcacagagctgaacccccacctcatgtgtgccctctgcggggggtacttcatcgacgccaccactatcgtggagtgcctgcattccttctgcaaaacctgcatcgtgcgctacctggagaccaacaaatactgccccatgtgtgacgtgcaggtccataaaacccggccgctgctgagcatcaggtctgacaaaacacttcaagacattgtctacaaattggtccctgggctttttaaagatgagatgaaacggcggcgggatttctatgcagcgtaccccctgacggaggtccccaacggctccaatgaggaccgcggcgaggtcttggagcaggagaagggggctctgagtgatgatgagattgtcagcctctccatcgaattctacgaaggtgccagggaccgggacgagaagaagggccccctggagaatggggatggggacaaagagaaaacaggggtgcgcttcctgcgatgcccagcagccatgaccgtcatgcatcttgccaagtttctccgcaacaagatggatgtgcccagcaagtacaaggtggaggttctgtacgaggacgagccactgaaggaatactacaccctcatggacatcgcctacatctacccctggcggcggaacgggcctctccccctcaagtaccgtgtccagccagcctgcaagcggctcaccctagccacggtgcccaccccctccgagggcaccaacaccagcggggcgtccgagtgtgagtcagtcagcgacaaggctcccagccctgccaccctgccagccacctcctcctccctgcccagcccagccaccccatcccatggctctcccagttcccatgggcctccagccacccaccctacctcccccactcccccttcgacagccagtggggccaccacagctgccaacgggggtagcttgaactgcctgcagacaccatcctccaccagcagggggcgcaagatgactgtcaacggcgctcccgtgccccccttaacttgaggccagggaccctctcccttcttccagccaagcctctccactccttccactttttctgggcccttttttccacctcttctactttccccagctcttcccaccttgggggtggggggcgggttttataaataaatatatatatatatgtacataggaaaaaccaaatatacatacttattttctatggaccaaccagattaatttaaatgccacaggaaacaaactttatgtgtgtgtgtatgtgtggaaaatggtgttcattttttttggggggggtcttgtgtaatttgctgtttttgggggtgcctggagatgaactggatgggccactggagtctcaataaagctctgcaccatcctcgctgtttcccaaggcaggtggtgtgttgggggccccttcagacccaaagctttaggcatgattccaactggctgcatataggagtcagttagaatcgtttctttctctccccgtttctctccccatcttggctgctgtcctgcctctgaccagtggccgccccccacgttgttgaatgtccagaaattgctaagaacagtgccttttacaaatgcagtttatccctggttctgaggagcaagtgcagggtggaggtggcacctgcatcacctcctcctcttgcagtggaaactttgtgcaaagaatagatagttctgcctctttttttttttttcctgtgtgtgtggcctttgcatcatttatcttgtggaaaagaagattcaggccctgagaggtctcagctcttggaggagggctaaggctttagcattgtgaagcgctgcacccccaccaaccttaccctcaccggggaaccctcactagcaggactggtggtggagtctcacctggggcctagagtggaagtgggggtgggttaacctcacacaagcacagatcccagactttgccagaggcaaacagccttccaattgcccctccacccccagctgaggcccggtcacctggtcaggacagagcaactgcatctaaaagcacaagaagacagaaacctgtaagctctgaccccacccccaccccttgagaggtcagcggaccacctccttagggacagaccctggcaggtcgctgcccaccgagatttcctcaagtgtgcatagatctgagaggagtcgggagtcgagactcgagattccatcatagcgtaggtgtgtggggttgggagccccctgatgggcttgtctgtgtttgcaccttgtcctgtgtctgaggtcctgtgactgtaccctcctttgccctgggacatctgtatctcttggctttgtaataaatgctgcatactttctaaaaaaaaaaaaaaaaaa

SEQ ID NO: 616 - DNA, 1009 bp, Homo sapiens
  ref <308>: DATABASE ACCESSION NUMBER: NCBI / NM_007108
  ref <309>: DATABASE ENTRY DATE: 2011-11-28
  ref <313>: RELEVANT RESIDUES IN SEQ ID NO: (1)..(1009)
gggaacggggcggagcgcggctgcgccggcgcgtcgaggggagaggcagcagccgcgatggacgtgttcctcatgatccggcgccacaagaccaccatcttcacggacgccaaggagtccagcacggtgttcgaactgaagcgcatcgtcgagggcatcctcaagcggcctcctgacgagcagcggctgtacaaggatgaccaactcttggatgatggcaagacactgggcgagtgtggcttcaccagtcaaacagcacggccacaggccccagccacagtggggctggccttccgggcagatgacacctttgaggccctgtgcatcgagccgttttccagcccgccagagctgcccgatgtgatgaagccccaggactcgggaagcagtgccaatgaacaagccgtgcagtgaggacccccaagaggcccatttcccccaataaaagagatttgggagtctgcctggttgctgcctctttttcccgcccctccctgggatgggtcccactccctgtgggctccttttggggcttgtgcttggcagttcctgtgctgtcctgtctcccagatcctgagaccctggctgagaacttggcccagcctgctgcttaaaggcaccatggggacctgggttgccctgagacccaagccattgttagcagctagccagccacaccaaccacgccagggggaggaaagggaaggactgggagagacacaaagaccagagccagcctcagggacaagagattccagttttaggcctttctccttctaagtgccccccacccccatagcctgcatgtccactcccagacgatggccaagagcagaaacacaagctggagccagtgtcctggtttgacagcatgttcaacgagggaaccccaagacggacccacacaggtccacccacgctgggggctgtaatcacggagggaagtggctgcccccttaacacacctttaataaacagtctacagacccaaaaaaaaaaaaaaaaaaaa

SEQ ID NO: 617 - DNA, 924 bp, Homo sapiens
  ref <308>: DATABASE ACCESSION NUMBER: NCBI / NM_007278
  ref <309>: DATABASE ENTRY DATE: 2011-11-19
  ref <313>: RELEVANT RESIDUES IN SEQ ID NO: (1)..(924)
gctccgctgaatccgcccgcgcgtcgccgccgtcgtcgccgccccccgtcccggcccccctgggttccctcagcccagccctgtccagcccggttcccgggaggatgaagttcgtgtacaaagaagagcatccgttcgagaagcgccgctctgagggcgagaagatccgaaagaaatacccggaccgggtgccggtgatagtagaaaaggctcccaaagctcggataggagacctggacaaaaagaaatacctggtgccttctgatctcacagttggtcagttctacttcttgatccggaagcgaattcatctccgagctgaggatgccttgtttttctttgtcaacaatgtcattccacccaccagtgccacaatgggtcagctgtaccaggaacaccatgaagaagacttctttctctacattgcctacagtgacgaaagtgtctacggtctgtgaagctgctgcccctgagctggaggggggtctcattctacaaagagagaggtggcccccctttcttgacctcctcctccttcaagctcaaacaccacctcccttattcaggaccggcacttcttaatgtttgtggctttctctccagcctctcttaggaggggtaatggtggagttggcatcttgtaactctcctttctcctttcttcccctttctctgcccgcctttcccatcctgctgtagacttcttgattgtcagtctgtgtcacatccagtgattgttttggtttctgttccctttctgactgcccaaggggctcagaaccccagcaatcccttcctttcactaccttcttttttgggggtagttggaagggactgaaattgtggggggaaggtaggaggcacatcaataaagaggaaaccaccaagctgaaaaaaaaaaaaaaaaaaaaaaaaaaaaaaaaa

SEQ ID NO: 618 - DNA, 373 bp, Homo sapiens
  ref <308>: DATABASE ACCESSION NUMBER: NCBI / NM_007100
  ref <309>: DATABASE ENTRY DATE: 2011-11-28
  ref <313>: RELEVANT RESIDUES IN SEQ ID NO: (1)..(373)
agctccgcctttgcctccaaggctttgctggcttgtgcggcatcctgctccgtctgcaggttgtgcttccggtgcggaggtcagggacaagatggtgccaccggtgcaggtctctccgctcatcaagctcggccgctactccgccctgttcctcggtgtggcctacggagccacgcgctacaattacctaaaacctcgggcagaagaggagaggaggatagcagcagaagagaagaagaagcaggatgaactgaaacggattgccagagaattggcagaagatgacagcatattaaagtgagtgaccctgcgacccactctttggaccagcagcggatgaataaagcttcctgtgttgtgtgataaaaaaaaa

SEQ ID NO: 619 - DNA, 1831 bp, Homo sapiens
  ref <308>: DATABASE ACCESSION NUMBER: NCBI / NM_006936
  ref <309>: DATABASE ENTRY DATE: 2011-12-18
  ref <313>: RELEVANT RESIDUES IN SEQ ID NO: (1)..(1831)
agccacgtgacccccgtgccggccaacgggtgcgccgggatttgggggataaagcgcggccccgcgcacagttgcggcgggagagcggcggggccgagagcgtgactcgcccgctccgcgctgcttcccccgcgccgcctccccgcgccgctcgcgcagccatgtccgaggagaagcccaaggagggtgtgaagacagagaatgaccacatcaacctgaaggtggccgggcaggacggctccgtggtgcagttcaagatcaagaggcacacgccgctgagcaagctgatgaaggcctactgcgagaggcagggcttgtcaatgaggcagatcagattcaggttcgacgggcagccaatcaatgaaactgacactccagcacagctggagatggaggacgaggacaccatcgacgtgttccagcagcagacgggaggtgtgccggagagcagcctggcagggcacagtttctagagggcccgtccccagcccgggccgtccatcctcgcattgctgttgaatggtgagcacgtgaccatgccgaccacaaaggtgtctgcggaaactcgaggacattcaccacgatgattttcctctctttgatgtacttcaagtgcaactcaaaactatatctgcagggatgaatctgtaacttaaattgggccaatcagaattgttatctttgttcaggtaaaatgagttgcaagatattgtgggtacttttgtgtgctcatttgtgttttccccccctcctacaacatttttttaaccccaaaattatagcctgaatgttcgcttttagtctggccagggatctgactcctgagttggttgcctctcccctgctcactccagtcacatagagaattggtgtttcccgcagtggggatgcagctgttggacaggtattgggggcaaggttggtagggaggacagactgtcacttgctgttacaggcacaggtgattaaaatgctaaatattgcaaatttaagctttgtcagtatatggaaaagttgaagggaaaatactggaatgcttcttcaaaggttaaaaaataaccgagtcttttggtaatttgaccccacgtgctctctggccctcaagcatgtaacctcggggtctgaggcccaggacccacccccctgccacccctcccaccccactccctgctcagtacctggcgttggtacacaggcaaggattggcacaaccaaaattggcctttttctccctcttaatattgaagaaattcccacatttctcatttggtaatggtgttgtggcctcagatttcttctagtatttgcttctgatgaatgattatggtctatacataaaaaagtaagactaagtattgctgaatttgcagttatgttgtcgtgtataagagctacttccaagtgtggttacaaatgaacccatggaatgatgacttcatgttcttctcgtgggtttgtgccgtgctgctttccaaataggtattgaatttatgcattagtctggtgatttcagttctgtgaaatattttgggatctataccaattaaacattttcatagttctgcctattgtccttccctgaggctccattgctgcttggtggccattctctgcctttttacagtcacctgaacaatgacccatcatctcttgcttgcttgaaatcttgctgaaatgttctcatttcctgtttgctgtatgggctcgggtgggatgtttgttggctctgttgtgtttattcaccaatttgtacattatttgttgtcctttactactgtaaacagtaaatatagtttggtattctgtcaaaaaaaaaaaaaaaaaaaaaaaa

SEQ ID NO: 620 - DNA, 1539 bp, Homo sapiens
  ref <308>: DATABASE ACCESSION NUMBER: NCBI / NM_006899
  ref <309>: DATABASE ENTRY DATE: 2011-11-20
  ref <313>: RELEVANT RESIDUES IN SEQ ID NO: (1)..(1539)
gcgggaaacatggcggcattgagcggagtccgctggctgacccgagcgctggtctccgccgggaaccctggggcatggagaggtctgagtacctcggccgcggcgcacgctgcatcgcggagccaggccgaggacgtgagggtggagggctcctttcccgtgaccatgcttccgggagacggtgtggggcctgagctgatgcacgccgtcaaggaggtgttcaaggctgccgctgtcccagtggagttccaggagcaccacctgagtgaggtgcagaatatggcatctgaggagaagctggagcaggtgctgagttccatgaaggagaacaaagtggccatcattggaaagattcataccccgatggagtataagggggagctagcctcctatgatatgcggctgaggcgtaagttggacttatttgccaacgtagtccatgtgaagtcacttcctgggtatatgactcggcacaacaatctagacctggtgatcattcgagagcagacagaaggggagtacagctctctggaacatgagagtgcaaggggtgtgattgagtgtttgaagattgtcacacgagccaagtctcagcggattgcaaagttcgcctttgactatgccaccaagaaggggcggggcaaggtcactgctgtccacaaggccaacatcatgaaacttggggatgggttgttcctgcagtgctgtgaggaagttgctgaactgtaccccaaaatcaaatttgagacaatgatcatagacaactgctgcatgcagctggtgcagaatccttaccagtttgatgtgcttgtgatgcccaatctctatgggaacattattgacaatctggctgctggcctggttgggggagctggtgtggtccctggtgagagctatagtgcagaatacgcagtctttgagacgggtgcccggcacccatttgcccaggcagtgggcaggaatatagccaatcccacggccatgctgctgtcggcttccaacatgctgcggcatcttaatcttgagtatcactccagcatgatcgcagatgcggtgaagaaggtgatcaaagttggcaaggtgcggactcgagacatgggcggctacagcaccacaaccgacttcatcaagtctgtcatcggtcacctgcagactaaagggagctagagccctttatttcttccaaccttgcaaggaccacactccccatacccttcagtgcagtgtaccagggaagagaccttgtgcctctaagcagtggaccatggtcaccttgctgggtagagcctaggttgtccttgggccggcttccttaggggacagactgttgggtggtgatggggattgttaggatggagcccaggccacatggatgatgatgattctcccccacaggttcgaacctctgacatgggtggctatgctacttgccatgacttcactgaggctgtcattgctgccttgccccacccataggccctgtccatacccatgtaaggtgttcaataaagaacatgaaccaaaaaaaaaaaaaaaaaa

SEQ ID NO: 621 - DNA, 1575 bp, Homo sapiens
  ref <308>: DATABASE ACCESSION NUMBER: NCBI / NM_006801
  ref <309>: DATABASE ENTRY DATE: 2011-12-25
  ref <313>: RELEVANT RESIDUES IN SEQ ID NO: (1)..(1575)
ctcttcccggctccagctccgccgccagctccagcctttgctccccctcccaaagtcccctccccggagcggagcgcacctagggtccctcttccgtccccccagcccagctacccgttcagaccagcagcctcggggggcacccccccgccagcctgcctccctcccgctcagccctgccagggttccccagccatgaatctcttccgattcctgggagacctctcccacctcctcgccatcatcttgctactgctcaaaatctggaagtcccgctcgtgcgccggaatttcagggaagagccaggtcctgtttgctgtggtgttcactgcccgatatctggacctcttcaccaactacatctcactctacaacacgtgtatgaaggtggtctacatagcctgctccttcaccacggtctggttgatttatagcaagttcaaagctacttacgatgggaaccatgacacgttcagagtggagttcctggtcgttcccacagccattctggcgttcctggtcaatcatgacttcacccctctggagatcctctggaccttctccatctacctggagtcagtggccatcttgccgcagctgttcatggtgagcaagaccggcgaggcggagaccatcaccagccactacttgtttgcgctaggcgtttaccgcacgctctatctcttcaactggatctggcgctaccatttcgagggcttcttcgacctcatcgccattgtggcaggcctggtccagacagtcctctactgcgatttcttctacctctatatcaccaaagtcctaaaggggaagaagttgagtttgccggcatagccccggtcctctccatctctctcctcggcagcagcgggaggcagaggaaggcggcagaagatgaagagctttcccatccaggggtgacttttttaagaacccacctcttgtgctccccatcccgcctcctgccgggtttcagggggacagtggaggatccaggtcttggggagctcaggacttgggctgtttgtagttttttgccttttagacaagaaaaaaaaatctttccactctttagtttttgattctgatgactcgtttttcttctactctgtggccccaatttttataaagtgtttttgagtgtcctatgggccggggcagggtccaagatcttttcccttccccaggcccctcggctccctcccagatcccacccccagccccactggttgccaaacactaaatctgccgacacccatctgccccacctcctgccatggccatgaaccgcgacccccactaaatttctagattggggatagggagaaagggaggcccaggaaggtctcccctgattttttttcatagtaatttttttccccagagtttgaattttttggtcttctcctggttttttggcaaattaggggggcccggggctcaagtgcgggaagggggctggcccgaggatcccatggctctcacaccatgtttttgtacagaactgatggttgaatctttgttctcttgaaataaacagaagaaaatgaaacctttaaaaaaaaaaaaaaaaaa

SEQ ID NO: 622 - DNA, 7935 bp, Homo sapiens
  ref <308>: DATABASE ACCESSION NUMBER: NCBI / NM_006612
  ref <309>: DATABASE ENTRY DATE: 2011-11-28
  ref <313>: RELEVANT RESIDUES IN SEQ ID NO: (1)..(7935)
ccagctcgcgctgcccgggcgggcgccggccgctggcgccgctactgctgccgcccccggggcgcgagtccgccgcccgccgcccgggcacccggcgaggggcgggggcagctccgaaccggccccagatccttcccgcttccgcctcacgcttcccggaaagcttgtccctctccgccgagctgctccgggagccccgccgcgccgagggtatctcccagagccccagctggtgtggccaggccccaggagtaggatggggctccccctacgagggccggtggcagccagaactgatacagcccccctggtctggggccaggacgccagctgaggagggcaggagtgtctggagctatggctggtgcctcggtgaaagtggcagtgagggttcggccctttaacgcccgtgagaccagccaggatgccaagtgtgtggtcagcatgcagggcaacaccacctccatcatcaatcctaaacagagcaaggatgcccccaaaagcttcacctttgactactcctactggtcacacacttcgacggaggacccccagtttgcatctcagcagcaagtgtatcgggacattggagaagagatgctgctccacgcctttgaaggctacaacgtgtgcatctttgcctatgggcagaccggggctgggaaatcctataccatgatggggcgacaggagccagggcagcagggcatcgtgccccagctctgtgaggacctcttctctcgcgttagtgagaaccagagtgctcagctatcctactctgtggaggtgagctatatggagatctactgtgagcgggtacgagacctcttgaaccccaagagtcggggttctctgcgggtccgggagcaccccatcctgggcccgtacgtgcaggacctgtccaaattggctgtgacctcctacgcagacattgctgacctcatggactgtggaaataaagcacggactgtggctgccaccaacatgaatgagaccagcagccgttcccatgccgtctttaccatcgtcttcacacagcgctgccatgaccagctcacggggctggactcggagaaggtcagtaagatcagtttggtggaccttgctgggagtgagcgagccgactcctcaggggcccggggcatgcgcctgaaggaaggagccaacatcaataagtccctgactacactagggaaagtgatctcggcccttgcagatatgcaatcaaagaagcgaaagtcggattttatcccctacagggactctgtgctcacctggctgctcaaggaaaatttgggggggaactcacgcacagccatgattgcagccctgagccctgctgacatcaattacgaggagactctcagcaccctcaggtatgctgaccgcaccaagcaaatccgctgcaatgccatcatcaacgaggaccctaatgcccggctgattagagagctgcaggaggaagtagcccggctgcgggaactgctgatggctcagggactgtcagcctctgctctggaaggcctgaagacggaagaagggagtgtcagaggcgccctgccagctgtgtcatctcccccagctccagtttcaccctcatcacccaccacacataatggggagctggagccgtcattctcccccaacacggagtcccagattgggcctgaggaagccatggagaggctgcaggagacagagaagattatagctgagctgaacgagacatgggaggagaagctacgcaagacagaagccctgaggatggagagagaagcattgctggctgagatgggggtggccgtccgggaggatgggggaactgtgggcgtcttctctccaaagaagactccccacctggtgaacctgaacgaagaccctctgatgtctgagtgtctgctctaccacatcaaagatggcgtcaccagggtcggccaagtagatatggacatcaagctgaccggacagttcattcgggagcaacactgtctgttccggagcatcccccagccagatggagaagtggtggtcactctggagccttgtgaaggagctgagacatatgtgaatgggaagcttgtgacggagccgctggtgctgaagtcagggaataggattgtgatgggcaagaaccacgttttccgcttcaaccacccggagcaggcaaggctggaacgggaacgaggggtccccccacccccaggaccgccctctgagccagtcgactggaactttgcccagaaggaactgctggagcagcaaggcatcgacataaagctggaaatggagaagaggctgcaggatctggagaatcagtaccggaaagaaaaggaagaagccgatcttctgctggagcagcagcgactgtatgcagactcggacagcggggatgactctgacaagcgctcttgtgaagagagctggaggctcatctcctccttgcgggagcagctgccgcccaccacggtccagaccattgtcaaacgctgtggtctgcccagcagtggcaagcgcagggcccctcgcagggtttatcagatcccccagcgacgcaggctgcagggcaaagacccccgctgggccaccatggctgacctgaagatgcaggcggtgaaggagatctgctacgaggtggccctggctgacttccgccacgggcgggctgagattgaggccctggccgccctcaagatgcgggagctgtgtcgcacctatggcaagccagacggccccggagacgcctggagggctgtggcccgggatgtctgggacactgtaggcgaggaggaaggaggtggagctggcagtggtggtggcagtgaggagggagcccgaggggcggaggtggaggacctccgggcccacatcgacaagctgacggggattctgcaggaggtgaagctgcagaacagcagcaaggaccgggagctgcaggccctgcgggaccgcatgctccgcatggagagggtcatccccctggcccaggatcatgaggatgagaatgaagaaggtggtgaggtcccctgggccccgcctgaaggatcagaggcagcagaggaggcagcccccagtgaccgcatgccgtcagcccggcccccctcgccaccactgtcaagctgggagcgggtgtcacggctcatggaggaggaccctgccttccgtcgtggtcgtcttcgctggctcaagcaggagcagctacggctgcagggactgcagggctctgggggccggggcggggggctgcgcaggcccccagcccgctttgtgccccctcacgactgcaagctacgcttccccttcaagagcaacccccagcaccgggagtcttggccagggatggggagcggggaggctccaactccgctccaaccccctgaggaggtcactccccatccagccacccctgcccgccggcctccgagtccccgaaggtcccaccatccccgcaggaactccctggatggagggggccgatcccggggagcgggttctgcacagcctgaaccccagcacttccagcccaaaaagcacaactcttatccccagccaccccaaccctacccagcccagcggcccccagggccccgctaccccccatacactactcccccacgaatgagacggcagcgttctgcccctgacctcaaggagagtggggcagctgtgtgagtcccacatcctgggcagagggcctggtggggccccttgctaggagaagggaagacgcccgagacgctgcttccccagaagtgctggggcagggaggcccaggagatgagagagaaggtccgagtaggtgatagaagacaagggggagaccgagccggaggctgaggaaaggaagagggcacggagttgccaggagcaaaccaaagtgaagagagagataggaagctgcctcggggccaccccttgcaaagggggtgtgtcccacaaacgctgctatgggtggggtggggggctggggtgctgcgtagccagtgtttgactttcttttcaagtgggggaaagtgggagaggactgagagtgaggcaagttctccccagcccctgtccgtctgtctgtctgtctgtggtggtttctgtttcttgggaggcatggtaggatcataagtcattcccctccccttccaggcctcctgctatatttgggggacctgactggtttggctggagtcccatgaggatgtgggccctttaataaaggatagcaaacagggagcttgtggcctgtttgttttgggttttcatggaggtgtaggttatataaggcaatggcacaggtcttaagcatacttatcagtgaagtattgtatgtgtgctctgtgcaggcaccacccagatctggatataagaatgtttccatcttgtcttcctgaacttcaccctcctgtctcttccttcagggtgcgcagcccgatcttttccccgctttttttttttgggagacagggtcttgctttgttgcccaggctggaggtacagtcttggctcactgcagcctccgcctcctgagtagctgggattacaggcatgtgccaccacgcccggctcattactgttttttttgtagtgacgaggtttcaccatattggccaggctggtctcgaactcctgatgacctcaagtgatccgcccaccttggcctcccaaagtggtgggattacaggtgtgagccaccgcgcccggcctcccctgctttcatgtttgcttacccagtgtctcagtctgtgccagcagcaccactgtctgttatggacaaagcacagaagcggggatgcgaggggaggtagagggaccgccagcctgtcaatgcttaactggctgttgctgacagatacagaaggatttgtggggtacagaggagttctgctttaagtcacctaacttacttgaaaggtctcccaagcagccagtttctcttgatagtgaatgggttgggcaagcatactgcgcttacctgattgttttcatcctggttgtgttacctgccttctggcaggctacatcattgttcccagtcgttattttatttgtgttaagactgtttgttggccaggcgcagtggttcacgcctgtaatgccagcactgggaggccgaggcaggtggatcacgaggtcaggagatcgagaccatcctggctatcatggtgaaaccccatctctactaaaaataaaaataaaaaaattagccgggcatggtggcgggggcctgtagtcccagctactcaggaggctgaggcaggagaatggcatgaacctgggaggcggagcttgcagtgagctgagattgcgccactgcactccagcctgggcgacagagcgagactccatttcaagaaaaattaaaaaactgtttgttgcctgcttgttttaatgttctggcttgaggcagcgagcccttgactatgccacattgccaggattttgcaggttagattgtactacagcactgcctttggcttgccagactctggagtccccacattttcatcctgttctcaggaaaacactttgacccacttgaagctctgagctactgcttcacagcttcctggggtcagtctccagccaaaaccatagatatcccaactgcagccaaaccacggctctgggcgaaggaacgattaggtttactctaggtttccacaccctgatgctcctgcctttactttgacacctctgactgccaggttttcacagacctgttgacagtgactcaagatctggaatgtaatggatggtttggcaacagtgtttgcttgagcagtttaaaatctggccagggagactcaatgtgagcaagaaaatgatagaataccaagttttctggaggtcagagggagctgagttgagtgttaccgagaatgctgtggggtttgagatgagaaaaatagcttgctaatttaaaagacggattatttttccctaaagaccttgacttatgtaaatgtatattatccataattttaaaaatccacttatggctgggcacagaagctcacacctgtaatcccagcactttgggaggctgaggcaggaggatcagttgagtccaggagttcgagaccagcctgggcaacatagtgaaaccctgtatctacaaaacatagaaaaactagttgggtgtggtggtgtgtacctgtagttccagctactagggaggtaggaagatcacctgagcccatggagattgaggctgtggtgagctgtgaaggcaccacagcactctggcctgggcaagagtgggactctctcaaaaaaaaaaaaaaaaaaaaatccacatatccagccttccaagtcagtctttaataatgtgcacgggccaggcacagtggctcacacccgtaatcccaacactttggaatattagggtgggagcatcacttgaggccaggaatttgagaccagcctgggcaacatagtgagactgccccccccatctctacaaaaaataaaaatcaaaaataatactgtgggcaaactttacttagattttattcagagtagtgcctgtttatttttcatctgtgctacctgtgccggcattccatatgcatttgatttagtctttaaagtaccccggtaaaataggtcttttgtctgcatttttcagatgggaagactgaggttttgtttatttatttttatttatttattttttgagacggagtctcgctctgttgcctaggctggagtgcgatggcacaatcttggctcactacaacctccgcttcctgggttcaagcgattctcctgcctcagcctcctgagtagctaggattacaggcgcccacaaccgcacccggctaattttttgtatctttagtagagacagggtttcactatgttgtccaagctggtttcgaattcctgacctcaggtgatccacccgcctctgcctcccaaaatgttgggattacaggcgtgagccaccacgcccagcctatttatttatttttttagaatcaagatcttgctatgttgcccaggctgaactcgaactcctgggctcaagcaatcctgcctcccaagccaagcagctggtactgcaagcatgtgccaccgtgcctggctcctgaagactgaggttggtttagattaatgagttgcccaaattcagacagttcttaagtggcaaagttaggattccaacccaggtcaacataactaaagcccaaaccccatctcacccctctaggccatcaagtattggctgggtgcggtggtttatgtctgtaatcccagcactttgggaggcggaggcgggaggactgtttgagctcaggagtttgagaccagcctgggcaacataacaagaccctgtctctacaaaaatatataaattagccgggtgtactggctcacacctgtagctacttgggaggctgaggtgggaggatcgcttgagcctgggaggtcaaggctgcggtgacctgtgattgcaccaccaggagaccctgtcttaaaaatgtatatataaaaataaaaagaacatcagacatcaccatcacctcgcttagaatccatggggccttctcctcaaattcaatcttcccaggcatttcatgaacttgcgtctagtttctgttccctctcaaattgcccaggctgtcctgtgagtgacagcagctatttcgtgggcctcctctggaatcatgagaagtcacccaaacaatctcagttttctagctcactccgtcttgacatttctacactgtcatccttggttttcttggaaattaatttgcttttcttcattgtctttctttggagctgctttccttttgttggttactattttatttttagcttctcacaccataccgacatatgttggttattcttttagacatgttttttgttgttgttgtcacctggaacttttgtatcttgaataaatttggggatcaaataaaaaaaaaaaaaaaaaaa

SEQ ID NO: 623 - DNA, 3198 bp, Homo sapiens
  ref <308>: DATABASE ACCESSION NUMBER: NCBI / NM_006659
  ref <309>: DATABASE ENTRY DATE: 2011-12-17
  ref <313>: RELEVANT RESIDUES IN SEQ ID NO: (1)..(3198)
ccactggatcctacaactactttttccctcttttgctcacgcacctcgaagaactggtgctcccgcgggaagcgcacggggcgcgcaacgaagcgaaagggcgcggccccagccgcgggatcccgctctacaggcagcggctccgccgccccgggccccgcagcgaggcgggcgcacagcgcggggggcaactgcatcaccccgggcgcgggcgggcgcagcctgtcggccaccgtccgcgagccgagccggacgtgacgtcacgctcacttccgccgccgtcgggggctgcgcgggggctgtggctccgggactgcggagaacatattgtgatgttcgtgcctcagagctaaaactatgagtgaatttcggattcaccatgacgtcaatgaactgcttagcctgctgcgtgtccacggaggagatggggctgaggtctacattgacctgcttcaaaagaacaggaccccgtacgtcactaccactgtctctgctcacagtgccaaggttaaaattgcagagttttctcgtactccagaagactttctaaagaaatatgatgaactgaaatctaaaaatacaaggaaccttgacccgctggtgtacctgttgtcaaagctcacggaagacaaagagactctgcagtacttacaacagaatgcaaaagaaagagctgagcttgcagccgctgctgtgggcagcagtaccaccagcatcaacgtccctgccgcggcctccaagatctccatgcaggagcttgaggaactgaggaagcagcttggcagcgtggccacaggctccacgctgcagcagtctctggaacttaaaagaaagatgcttcgagacaagcagaacaaaaaaaattcaggccagcacctccccatcttcccagcatgggtgtatgagagacctgccctgatcggggatttcctgattggtgctggcatcagcacagacaccgctttgccgataggcacgttgcccctggcctcgcaggagtcggccgtggtggaggacctgctgtacgtgctggtgggcgtggacgggaggtacgtcagtgctcagcccctggctgggaggcagagccggaccttcctcgtggaccccaacctggacctgtccatcagggagctggtgcacaggatcctcccagtggccgccagctactccgctgtgaccaggttcattgaagagaagtcttccttcgagtacgggcaggtgaaccacgccctggcggccgccatgcgcaccctggtgaaggagcacctgattctggtgtcacagctggagcagctgcacaggcagggcctcctttcgctgcagaagctctggttctacatccagccagccatgcgcaccatggacatcctggcctccctcgccacctcggtggacaaaggcgaatgtcttggggggtccacgctgagcctgctccacgacaggagcttcagctacacaggggacagccaggcgcaggagctatgcctgtacctaaccaaggcggccagtgctccctacttcgaggttctggagaagtggatctacaggggcatcatccacgacccatacagtgagtttatggtcgaggagcacgagctgcggaaggagaggatccaggaggattacaacgacaagtactgggaccagcggtacaccatcgtccagcagcagatcccgtccttcctgcagaaaatggcggacaagatcctcagcacaggaaaatatctaaatgtggtcagagagtgtggccatgacgtcacctgcccggtggctaaagagatcatctacacgttaaaagagcgggcgtatgtggagcagatcgagaaggcgtttaactacgccagcaaggtgctgctggacttcctgatggaggagaaggagctggtggctcacctcaggtccatcaagcgctacttcctcatggaccagggcgacttcttcgtgcacttcatggacctcgcggaggaggagctccggaagccggtggaggacatcacgccccctcgcctggaagcgctcctggagctggcgctgcgcatgagcacggccaacactgaccccttcaaggacgacctcaagatcgacctgatgccccatgacctcatcactcagctcttgcgcgtcctggccatcgagaccaagcaggagaaggcgatggcgcacgccgaccccacggagctggcgctgagcggcctggaggccttctctttcgactacatcgtcaagtggcccctttcgctcatcatcaacaggaaagccctcactcgctaccagatgctcttcaggcacatgttctactgcaagcacgtggagcggcagctctgcagcgtctggatcagcaacaaaaccgccaagcagcactcgctgcactccgcccagtggtttgctggggctttcactctgcggcagcgaatgctcaacttcgtccagaatattcaatactacatgatgtttgaagtgatggaaccgacctggcacatcctggagaaaaacctgaaatccgcctccaacattgacgacgtccttggccaccacacaggcttcctggacacctgcctgaaggactgcatgctcaccaaccccgagctgctgaaggtcttctccaagctcatgtctgtgtgcgtcatgttcaccaactgcatgcagaaatttacacagagcatgaaattagatggcgagctgggcgggcagacgctggagcacagcaccgtcctggggctgcccgcaggggccgaggagcgggcccggaaggagctcgccaggaagcacctggctgagcacgcagacactgtgcagctggtgtccggcttcgaggccaccatcaacaagtttgacaagaacttctcagcccacctgctggacctcctggcccggctgagcatctatagcaccagtgactgtgagcacggcatggccagcgtcatctccaggcttgacttcaatggtttctacacggagcgcctggagcgcctgtctgcagagaggagccagaaggccaccccccaagtgcctgtcctgcgggggcccccggctcctgcacccagggtcgcagtcaccgcacagtgagccctggctgtgacaggaaggaagggtgtggggtcagcagggactggtgcaaatgggtccagaattttcaaatcgaatgctctgtgttctgtctttgcagtttaaatataaagcaggaatgattgactcagc

SEQ ID NO: 624 - DNA, 3777 bp, Homo sapiens
  ref <308>: DATABASE ACCESSION NUMBER: NCBI / NM_006595
  ref <309>: DATABASE ENTRY DATE: 2011-11-27
  ref <313>: RELEVANT RESIDUES IN SEQ ID NO: (1)..(3777)
gtctttacgtagacgtcgggggcgcagccgcgctgtgcgcggtgactggcggctgcactggcggcagctggaggtgtaatagtgcgggtagtgggtttggagaagttccgaggcggcggtggcgccggtcaggacaaggatagcggaaccgggccctgggcttgtcgctcaccatgccgacagtagaggagctttaccgcaattatggcatcctggccgatgccacggagcaagtgggccagcataaagatgcctatcaagtgatattggatggtgtgaaaggtggtactaaggaaaagcgattagcagctcaatttattccgaaattctttaagcattttccagaattggctgattctgctatcaatgcacagttagacctctgtgaggatgaagatgtatctattcgacgtcaagcaattaaagaactgcctcaatttgccactggagaaaatcttcctcgagtggcagatatactaacgcaacttttgcagacagatgactctgcagaatttaacctagtgaacaatgccctattaagtatatttaaaatggatgcaaaagggactttaggtgggttgttcagccaaatacttcaaggagaggacattgttagagaacgagcaattaaattcctttctacaaaacttaagactttaccagatgaagtcttaacaaaggaagtggaagagcttatactaactgaatccaaaaaggtcctagaagatgtgactggtgaagaatttgttctatttatgaagatactgtctgggttaaaaagcttacagacagtgagtggaagacagcaacttgtagagttggtggctgaacaggccgacctagaacagaccttcaatccctcggatcctgactgtgtggacaggctcttacagtgcactcggcaggcagtacccctcttctctaaaaatgtccattccacaaggtttgtgacatatttctgtgagcaggttctccctaacctcggtaccttgactaccccagtggaaggtcttgatatacagttggaggtattgaaattgttggcggagatgagttcattttgtggtgacatggaaaaactagaaacaaatttaaggaaactatttgataagttattggaatacatgcccctccctccagaagaggcagaaaatggagagaatgctggtaatgaagaacccaagctacagttcagttatgtggaatgtttgttgtacagttttcaccagttgggccgaaaacttccagatttcttaacagccaaactgaatgcagaaaagctcaaagatttcaaaatcaggctgcagtactttgcacggggcctgcaagtttatatcagacaacttcgcttagctctccagggtaaaacgggtgaggccttaaaaacagaagagaacaagattaaagtcgttgcattgaaaataacaaacaatatcaatgttttaatcaaggatctcttccacattcctccttcttataagagcacagtaacactatcctggaaacctgtacaaaaggttgagattgggcaaaagagagccagtgaagatacaacttcaggttcaccacccaagaaatcttcagcaggaccaaaaagagatgccaggcagatttataaccctcccagtgggaaatatagcagcaatttgggcaactttaattatgagaggagccttcaggggaagtagaggtggccgaggttggggcacacgaggaaatcgtagtcggggaagactctactgaataagacatcagcattcttcagcattgtcatgagcttaatatacttaaattctactactcattggattgccggggatgtccctttaaacagactgctgccttcagctaaaaacttaatgttctttatacctttgtatgtatgacctacttttgtaacagaccatggttgtgtccaaggtaaaaccacagtgatatttttggatgctttgtctgcaatcttgacttgtttttgcagtatcattattcagacttcaaattgtgaatcttttaaacatcttgataatttgttgttgagagctgttcattctaaaatgtaatgaaattcagtctagttctgctgataaagatcatcagttttgaaaggttactgattttcctcttccctcttagttttttacccaatatatggagaagagtaatggtcaatcttaacattttgttttaattgtttaataaagctgctgggcagtggtgcagcattcctacctagtgtcataaaagcaaaatacttacatagctttcttaaaatataggaatgacattacatttttaggagaaagtaagttgctttgcaccgcctacttaattcttttccatatattgtgatacaaacttttgaatatggaatcttactatttgaatagaaatgtgtatgtataatatacatacatacataagcatatatgtgtgtgtgtgtgtgtatatatatatatatgcatgctgtgaaacttgactacacaacataaatcactttttaaattccaggaacgggtagtctgacacggtgattatccttttgaggctgaatccgttattaacttgttatttaggtttttactcccagtagcaagggattctaagttagttgcacttacatgattattgttatttaaaactaagaataaaggctgcattttcaaagataaattggaattgctgttggtgaaataacaaccaaaatactgaatctgatgtacatacaggtttctacaggaagagatggtataatttacaatttggagatttaataaccagggctacccagaaaaagtgacttgataacatggtaccaataagtaagggatgctctctcggtttgcttttgccactttcaagattttaacttctcaggttattaatcaaaattattgtataagttagccaatagaatttttaggttaaaacaacagatggggggtttgtggagtgtttaatgtcatgggcatttttagtagcatagaccctttgttctgcatttgaatgtttcgtatatttttgtttcacagttaatcttccctccccaagtttgctattcaaatcaactgcctgaatgacatttctagtagtctgatgtatttttctgaggaatagtttgtgattccaatgcaggtgtcttcattaccattacctctacactgcagaagaagcaaaactcctttattagaattactgcacatgtgtatggggaaaatagttctgaaaggctagaatgatacaagtgagcaaaagttggtcagcttggctatggagtggtggcaataatctctaaacattccaaaagaccatgagctgaacctaaactcccttggaatctgaacaaaggaatataaaattgccatttgaaaactgaccagctaatctggacctcagagatagatcagccagtggcccaaagccatttcaagtacagaaattatagagactacagctaaataaatttgaacattaaatataattttaccactttttgtctttataagcatatttgtaaactcagaactgagcagaagtgactttactttctcaagtttgatactgagttgactgttcccttatccctcacccttccccttccctttcctaaggcaatagtgcacaacttaggttatttttgcttccgaatttgaatgaaaaacttaatgccatggatttttttcttttgcaagacacctgtttatcatcttgtttaaatgtaaatgtccccttatgcttttgaaataaatttccttttgtaattttgaaaaaaaaaaaaaa

SEQ ID NO: 625 - DNA, 1617 bp, Homo sapiens
  ref <308>: DATABASE ACCESSION NUMBER: NCBI / NM_006401
  ref <309>: DATABASE ENTRY DATE: 2011-12-17
  ref <313>: RELEVANT RESIDUES IN SEQ ID NO: (1)..(1617)
cggccgccgagccgagcagcgccgcgcggggccgagtggagccgagcagctgccgcgccgcgtcgccggtttaagcgcagtgcaggccgcggccgggggcggcggtagtgagcccagcgctgcgctccagcccccttttccctccatggtttctctccgctcccgtgagtaacttggctccgggggctccgctcgcctgcccgcacgccgcccgccacccaggaccgcgccgccggcctccgccgctagcaaacccttccgacggccctcgctgcgcaagccgggacgcctctcccccctccgcccccgccgcggaaagttaagtttgaagaggggggaagaggggaacatggacatgaagaggaggatccacctggagctgaggaaccggaccccggcagctgttcgagaacttgtcttggacaattgcaaatcaaatgatggaaaaattgagggcttaacagctgaatttgtgaacttagagttcctcagtttaataaatgtaggcttgatctcagtttcaaatctccccaagctgcctaaattgaaaaagcttgaactcagtgaaaatagaatctttggaggtctggacatgttagctgaaaaacttccaaatctcacacatctaaacttaagtggaaataaactgaaagatatcagcaccttggaacctttgaaaaagttagaatgtctgaaaagcctggacctctttaactgtgaggttaccaacctgaatgactaccgagagagtgtcttcaagctcctgccccagcttacctacttggatggctatgaccgagaggaccaggaagcacctgactcagatgccgaggtggatggtgtggatgaagaggaggaggacgaagaaggagaagatgaggaagacgaggacgatgaggatggtgaagaagaggagtttgatgaagaagatgatgaagatgaagatgtagaaggggatgaggacgacgatgaagtcagtgaggaggaagaagaatttggacttgatgaagaagatgaagatgaggatgaggatgaagaggaggaagaaggtgggaaaggtgaaaagaggaagagagaaacagatgatgaaggagaagatgattaagaccccagatgacctgcagaaacagaactgttcagtattggttggactgctcatggattttgtagctgtttaaaaaaaaaaaaaaggtagctgtgatacaaaccccaggacacccacccacccaaagagccaaagaatagttcctgtgacattccgccttccttccatgtagtccctcttggtaatctaccaccaagcttgtggacttcaccccaacaaaattgtaagcgttgttaggtttttgtgtaagattcttgctgtagcgtggatagctgtgattggtgagtcaaccgtctgtggctaccagttacactgagattgtaacagcatttttactttctgtacaacaaaaaagctttgtaaataaaatcttaacattttgggtctgttttttcatgctttgctttttaattattattattattttttttacattaggacattttatgtgacaactgccaaaaaagtatttttaagaatttaagcgaaataaacagttactctttggtaaa

SEQ ID NO: 626 - DNA, 821 bp, Homo sapiens
  ref <308>: DATABASE ACCESSION NUMBER: NCBI / NM_006423
  ref <309>: DATABASE ENTRY DATE: 2011-12-18
  ref <313>: RELEVANT RESIDUES IN SEQ ID NO: (1)..(821)
gggtggggccggcgtcgggcggggccggcggggtcttcagggtaccgggctggttacagcagctctacccctcacgacgcagacatggcagcgcagaaggaccagcagaaagatgccgaggcggaagggctgagcggcacgaccctgctgccgaagctgattccctccggtgcaggccgggagtggctggagcggcgccgcgcgaccatccggccctggagcaccttcgtggaccagcagcgcttctcacggccccgcaacctgggagagctgtgccagcgcctcgtacgcaacgtggagtactaccagagcaactatgtgttcgtgttcctgggcctcatcctgtactgtgtggtgacgtcccctatgttgctggtggctctggctgtctttttcggcgcctgttacattctctatctgcgcaccttggagtccaagcttgtgctctttggccgagaggtgagcccagcgcatcagtatgctctggctggaggcatctccttccccttcttctggctggctggtgcgggctcggccgtcttctgggtgctgggagccaccctggtggtcatcggctcccacgctgccttccaccagattgaggctgtggacggggaggagctgcagatggaacccgtgtgaggtgtcttctgggacctgccggcctcccgggccagctgccccacccctgcccatgcctgtcctgcacggctctgctgctcgggcccacagcgccgtcccatcacaagcccggggagggatcccgcctttgaaaataaagctgttatgggtgtcattcaggaaataaaaaaaaaaaaaaa

SEQ ID NO: 627 - DNA, 4785 bp, Homo sapiens
  ref <308>: DATABASE ACCESSION NUMBER: NCBI / NM_006460
  ref <309>: DATABASE ENTRY DATE: 2011-11-12
  ref <313>: RELEVANT RESIDUES IN SEQ ID NO: (1)..(4785)
acctgcttccctctcggatagccagggctgatgatttcaactcattaatcattccgaactcttcccaacaaacagcctcatggctgtcccggacctcctctgtcccggctcaggaaatgatctcggtcggaagtgaaaagaccaaatcggccccaggaggccattttcttcgacagaagctgaggcgtgggggcgtggccttcccccgcttccccctccactcccccgcccgcccccggccccggctttccgatctcggcccagggaagagccttggtcgcgaatcaccagtttgcatttgcccctggggcgggggcggctttctgagaccaggctggggctgggactccgccaccttcagctaagggtaccgaggtcagtccgggagtcgcgtcaccgggactcgaacccgcctcttcgtcttccgaggcctagtgcgagcctgcggcgctaaacgcagtcacactgtccctttaaggcggcactttttattcttcatttgtttacttcttcatgcgctcttcggtctttacaaaatgtgctcgcgatatccttccgcaagtgtcagtctcaggcactcaccacccgccttgaagccatttctataatcttaagactcgcgagttagcagccgtgggccgacgtctctctttataggatttaattcttttacattttagggactactttttaggaataaaccattcttgcgttagttaataaaggttcataaccttcggaacccctccgctgagaacaaaatacgataatagcctttataacgcaccttttcataaaaatattctgtgaggactctcataggccatcgaatcttctcgtattcctgaaacagaatggtacggtccagaacccgccccatcttctctgcgattggccgtccttcctcagcgagtcgtgtgatttttcaccaatggccgctcgcgtttctttagcgaggtctaagcgatggaaggtggcggccagggagacgccccctacgcgtcctgggattggctacgtcgcacggcgcgcgagggcggcgggcccgaaagataagaactacgactcccggcgccccgcaaagggaactccgttacgcatgcgcacgggcggggcgaaaaagcttctatataaaaggggcgcagaggactgggagacagcagttggaagttggcaggtggagaggcaggttgggagggaaagtcgggggaggacgcggaagaggagctgtgggaagggggaggagggagggaggaaaagaggaggaggcggaggagaactgagcagagcagagcatcgagccaaaggggagatgagtttgtctgtcctctgctgaggctacggccgggcctagggaactgggagcttgggtggaagcgacacccgtggaagtgggaggaggtggcgccgggactttaaccccttgtgggctctgcggcaggggatttaaccctttgtggatctggcccctcggaggcagcgtcatcggtagttttaaccccttcggggctgggtttcacgcactggacttaccctcatcaccttgctcaccaactcctttattggggtgctccgcttggaggtttgaggcccacctccgcccattacgtactgttcctgccgctgcacccccttggacccgctagctggccgcactgtgggcgcttaaccctttactgacttgagctccccagattgcagttggagtttgctgatagaaggactagctaaaggcgtcactgcaggaattacaaactgaagaggactctgttggactgttttttttttctttttcttttttttaagaaaaacccatttttttccttaaggacttactagccaaaatttcttaaacttcgaggactctactagccatggccgagccattcttgtcagaatatcaacaccagcctcaaactagcaactgtacaggtgctgctgctgtccaggaagagctgaaccctgagcgccccccaggcgcggaggagcgggtgcccgaggaggacagtaggtggcaatcgagagcgttcccccagttgggtggccgtccggggccggagggggaagggagcctggaatcccaaccacctcccttgcagacccaggcctgtccagaatctagctgcctgagagagggcgagaagggccagaatggggacgactcgtccgctggcggcgacttcccgccgccggcagaagtggaaccgacgcccgaggccgagctgctcgcccagccttgtcatgactccgaggccagtaagttgggggctcctgccgcagggggcgaagaggagtggggacagcagcagagacagctggggaagaaaaaacataggagacgcccgtccaagaagaagcggcattggaaaccgtactacaagctgacctgggaagagaagaaaaagttcgacgagaaacagagccttcgagcttcaaggatccgagccgagatgttcgccaagggccagccggtcgcgccctataacaccacgcagttcctcatggatgatcacgaccaggaggagccggatctcaaaaccggcctgtactccaagcgggccgccgccaaatccgacgacaccagcgatgacgacttcatggaagaagggggtgaggaggatgggggcagcgatgggatgggaggggacggcagcgagtttctgcagcgggacttctcggagacgtacgagcggtaccacacggagagcctgcagaacatgagcaagcaggagctcatcaaggagtacctggaactggagaagtgcctctcgcgcatggaggacgagaacaaccggctgcggctggagagcaagcggctgggtggcgacgacgcgcgtgtgcgggagctggagctggagctggaccggctgcgcgccgagaacctccagctgctgaccgagaacgaactgcaccggcagcaggagcgagcgccgctttccaagtttggagactagactgaaacttttttgggggagggggcaaaggggactttttacagtgatggaatgtaacattatatacatgtgtatataagacagtggacctttttatgacacataatcagaagagaaatccccctggctttggtttcgtaaatttagctatatgtagcttgcgtgctttctcctgttcttttaattatgtgaaactgaagagttgcttttcttgttttcctttttagaagtttttttccttaatgtgaaagtaatttgaccaagttataatgcatttttgtttttaacaaatcccctccttaaacggagctataaggtggccaaatctgagaacaattaaattcattttagttataataaatttaatatttgtaaatgtaacatagtttcagtgtgatttctagagctaattcaaaatagtattgatatattttatgtgactgcatttttggggaggggtaccgaaatcgttaaatttgtcagtttgcaaaaatatcaatctttaatgggagaattttcaatttgccaattttttccttgaatgggtttaagtatgctacaatatacagttcaggcaaaatttaagatgtaattatcttcaatacttaagtgtgcttgctttctagtgccttggttttctttcttgatgctggaaaaataaacaaaccggtattgagtgtttaggcgagtggaaagtggctacaatccaaaattttaaatttaactctgcctcggccattcaaaagtctaataacaaaaaatgtaaacctaatttggcagtttgttaggttagacaactgacagcctcatttcattcctacaagttggttttcagtaatctcttccttccccccagtaaggctggaagaggctcttggcaaacttcttagtgcaagcaatggttagattaatttgtgaggcagctctttaagacgttcagaggtaagaaatactggatttataaagcaaatggctgtttgggggattccaaggatttacctaattgtccaattctacgtgctctctataccaaaacaaaaaaaaaaagctatccacctttccatgtgggtcaaactaaaattagaaatgtcccctcactgcagatcaaatgtaaagcttccagttaaggagctaaatgaggtcctcagctgaatgaggaaccctgtacatccccttgcacagccctattctaaatcgcttaaactatgctgatagctgcttaggttcttgagtagttctgctcttaaacgtagggaggccctgagaactaaattttgccccaaaataaaaacagaaattatgagattgcctcctgtcattttggttaacccagtccttcacctgccctgtgtcagtgtcttctgagggcaattgcgttgctcaaatcactagcacagaggttccttaatttggggccttagaaaccattgtgggccttggggtccatgaaccccatgaaattatttgtagacttgtatgtacatttttctggggagaaggttcaagagattcataagattgtcaaactccttgaaggttcagaacctctgcagggaagggggaagaaaaccctcccattaggaagcatgcttttgcagttaaatggcgatggtggaggtgatagggacttcaagagtaaaatgcaccttgtattgcataagaagcatacacaaatcaataaatcaagggagattataccagtaggactgaatcagggccttcaaagctggactgagttggtcctgttctggcacatatggtccactggagacaatgtatgattgagtttttctttggtctaaaaattatattaaacatttattttgaaata

SEQ ID NO: 628 - DNA, 628 bp, Homo sapiens
  ref <308>: DATABASE ACCESSION NUMBER: NCBI / NM_006356
  ref <309>: DATABASE ENTRY DATE: 2011-11-20
  ref <313>: RELEVANT RESIDUES IN SEQ ID NO: (1)..(628)
tgacccacttccgttacttgctgcggaggaccgtgggcagccagggtcggtgaaggatcccaaaatggctgggcgaaaacttgctctaaaaaccattgactgggtagcttttgcagagatcataccccagaaccaaaaggccattgctagttccctgaaatcctggaatgagaccctcacctccaggttggctgctttacctgagaatccaccagctatcgactgggcttactacaaggccaatgtggccaaggctggcttggtggatgactttgagaagaagtttaatgcgctgaaggttcccgtgccagaggataaatatactgcccaggtggatgccgaagaaaaagaagatgtgaaatcttgtgctgagtgggtgtctctctcaaaggccaggattgtagaatatgagaaagagatggagaagatgaagaacttaattccatttgatcagatgaccattgaggacttgaatgaagctttcccagaaaccaaattagacaagaaaaagtatccctattggcctcaccaaccaattgagaatttataaaattgagtccaggaggaagctctggcccttgtattacacattctggacattaaaaataataattatacagttaaaaaa

SEQ ID NO: 629 - DNA, 1567 bp, Homo sapiens
  ref <308>: DATABASE ACCESSION NUMBER: NCBI / NM_005891
  ref <309>: DATABASE ENTRY DATE: 2011-11-26
  ref <313>: RELEVANT RESIDUES IN SEQ ID NO: (1)..(1567)
ggtgcgcggggaggtggagggcgaggggcggggctacctcaggtcccgcccgcggcaggcctgtgggctgcgaggaggagctttgcctagcttgcaggcagcgcagggcagacggcggcaggagaagcaagatgaatgcaggctcagatcctgtggtcatcgtctcggcggcgcggaccatcataggttccttcaatggtgccttagctgctgttcctgtccaggacctgggctccactgtcatcaaagaagtcttgaagagggccactgtggctccggaagatgtgtctgaggtcatctttggacatgtcttggcagcaggctgtgggcagaatcctgttagacaagccagtgtgggtgcaggaattccctactctgttccagcatggagctgccagatgatctgtgggtcaggcctaaaagctgtgtgccttgcagtccagtcaatagggataggagactccagcattgtggttgcaggaggcatggaaaatatgagcaaggctcctcacttggcttacttgagaacaggagtaaagataggtgagatgccactgactgacagtatactctgtgatggtcttacagatgcatttcacaactgtcatatgggtattacagctgaaaatgtagccaaaaaatggcaagtgagtagagaagatcaggacaaggttgcagttctgtcccagaacaggacagagaatgcacagaaagctggccattttgacaaagagattgtaccagttttggtgtcaactagaaaaggtcttattgaagttaaaacagatgagtttcctcgccatgggagcaacatagaagccatgtccaagctaaagccttactttcttactgatggaacgggaacagtcaccccagccaatgcttcaggaataaatgatggtgctgcagctgtcgttcttatgaagaagtcagaagctgataaacgtgggcttacacctttagcacggatagtttcctggtcccaagtgggtgtggagccttccattatgggaataggaccaattccagccataaagcaagctgttacaaaagcaggttggtcactggaagatgttgacatatttgaaatcaatgaagcctttgcagctgtctctgctgcaatagttaaagaacttggattaaacccagagaaggtcaatattgaaggaggggctatagccttgggccaccctcttggagcatctggctgtcgaattcttgtgaccctgttacacacactggagagaatgggcagaagtcgtggtgttgcagccctgtgcattgggggtgggatgggaatagcaatgtgtgttcagagagaatgaattgcttaaactttgaacaacctcaatttctttttaaactaataaagtactaggttgcaatatgtgaaatcagaggaccaaagtacagatggaaaccatttcctacatcacaaaaacccaagtttacagcttgtactttactttaatgtgtaatactcaactcaaggtacaagacaattgcatttaacattgttataaataaaaggaacatcagatcaatcattaaaaaaaaaaaaaaaaaa

SEQ ID NO: 630 - DNA, 3952 bp, Homo sapiens
  ref <308>: DATABASE ACCESSION NUMBER: NCBI / NM_005839
  ref <309>: DATABASE ENTRY DATE: 2011-11-21
  ref <313>: RELEVANT RESIDUES IN SEQ ID NO: (1)..(3952)
ggagtttagggcctgacagaagcccgcccccgctggcgctcgtgcgcacgcgtggcgggctctcggcgcactgagcaggcgcggcctcgtgtcggccggagggggcgggcgcaacgacgcgcgctgcgtcccggcgctcggctttccctccgccggtcccgccctccgtcgcggcggcgcggtgtaccctgggatagggagcgatctccgagcgaggcggcaagatggacgcgggatttttccgcggaacaagtgcagaacaggataatcggttcagcaacaaacagaagaaactactgaagcagctgaaatttgcagaatgcctagaaaaaaaggtggacatgagcaaagtaaatttggaggttataaagccttggataacaaaaagagtaacggaaatccttgggtttgaagatgatgttgtgattgagtttatattcaaccagctggaagtgaagaatccagactccaaaatgatgcaaatcaacctgactggatttttgaatggaaaaaatgctcgagaatttatgggagaactgtggcccctgctgctaagtgcacaagaaaacatcgcgggaatcccttctgctttcctagaactgaagaaagaagaaataaaacaaagacagattgaacaagaaaaactggcatctatgaaaaagcaagatgaagacaaagataaaagagataaggaagaaaaagaaagcagcagagaaaaaagggagcggtctcgtagcccaagaagacgcaaatccagatctccttcccctagaagacgatcttcccctgtcaggagagagagaaagcgcagtcattctcgatctccccgtcacagaaccaagagccggagtccttcccctgctccagaaaagaaggaaaaaactccagagctcccagaaccttcagtgaaagtaaaagaaccttcagtacaagaggctacttctactagtgacattctgaaagttcccaaacctgaacctataccagagcctaaagaaccttctccggaaaaaaattccaaaaaagaaaaggagaaggagaagacccgaccacgatctcggtcacgctccaaatcaagatcccggacgcggtcccgctctccttctcacactcgacctagacggcgccatagatcccgatcaagatcgtattcacctagaaggcggccaagcccaagaaggcggccatctcctcgaagaagaactccgccaagaagaatgcctcctccaccaaggcatagaaggagtagatctccagtaagacgaagaagacgttcgtcagcatccttgtctgggagtagctcatcatcctcttcatctcgttcacggtcaccaccaaagaagcctcccaagaggacatccagcccccctcggaaaactcgtaggttatctccttcagcaagtcctccaaggcgaaggcacaggccatcacctcctgcaactccaccacccaaaactcggcattcccctacaccccagcagtcaaaccgtacaagaaaaagtcgtgtttctgtgtctccagggagaacttcaggtaaagtgacaaaacataaaggtactgagaaaagagaatccccttcaccagcaccgaagcctagaaaagtagagttatctgaatcggaagaagataaaggtggcaaaatggctgcagcagattctgtgcagcagagacgccaatacagacgacaaaaccagcagtcttcatctgactctggctcctcctcctcctcagaagatgaacgacccaagagatcccatgtgaagaatggtgaggttggcaggcggcggagacattccccttcccggagtgcttctccatcaccacgaaagcgccaaaaagagacttcccctcgtggtagacggaggagaagtccatccccaccacccaccagaaggcgacggtctccttctcccgcccctcctcctcgacggcgcaggactcccacaccaccaccacgacgaaggactccttctcctcccccacgtcggcgctcaccttctcctagaagatactctcctccaatacagaggagatactctccttctccacctccaaagagaagaacggcttcacctcctccccctcctaaacgaagagcatcaccatctccaccaccaaagcggcgggtctcccattctccacctcccaaacaaagaagctccccagtcaccaagagacgttcaccttcattatcatccaagcataggaaagggtcttccccaagccgctctacccgggaggcccgatcaccacaaccaaacaaacggcattcgccctcaccacggcctcgagctcctcagacctcctcaagtcctccacccgttcgaagaggagcgtcgtcatcaccccaaagaaggcagtccccgtctccaagtactaggcccattaggagagtctccaggactccggaacctaaaaagataaaaaaggctgcttccccaagcccacagtctgtaagaagggtctcatcctcccgatctgtctccgggtctcctgagccagcagctaaaaagcccccagcacctccatcccccgtccagtctcagtcaccgtctacaaactggtcaccagctgtaccggtcaaaaaggccaaaagcccaacaccgagcccatcaccgccaagaaattcagatcaggaaggaggtggaaagaaaaagaagaaaaagaaggacaagaaacacaaaaaggataagaagcacaagaagcacaaaaaacacaagaaggaaaaggctgtggctgcagctgctgcagctgctgtgacccctgcagccattgcagctgccacaaccacattagcacaggaagagccagtggcagcgccagagccgaagaaggagactgaaagtgaagctgaagataaccttgatgatttagaaaagcacctgcgtgaaaaggccctgagatcaatgaggaaggcccaagtgtccccacagtcttagggggaaatgtttgttatgatgtaaattttatttggtttgtacgcagttcaatttcaaaattgctaaaatgtgtttgagctttagactataacatttgttgtaataattgctaggttgaagttcaacatgtaaaaaaagggggcatggatttacattgcaaaaggtgtccacagtgtattagtgacattctttcattgacagctgacataattcattgagtgaaatattttaagccaaaaaaaaattccctttttaaaaaagggggtttaaatactgttggcatttttatggttcctttaaatgccctagctattcccagaggggtttttttgtttgtttttttggttttgattttctttttgtttttctttcttcttcttatttttttcatttgagtcttagctcccatttaagttatgcttctgaccttgtatggtctgtaagcttgcccagaaataagaccactgttttgaactaccacaaaagtataaatgaatattttaatgccacaatctttcctgttgcctgtggagtctctgctgaaatgaatcaggattcgagctctaggatgagacagaaaatgaaagcatgttgtttgccaggacactgtgggtttatattgatgtgtaacaagttgatttggaacactggactctcattctgttattctggttttgttttttttgttttgttttttttcttttgtaaaggcaatgagctagtcccagaaaggatccttcagttacatacaatttgtttaatgaaatgtcatggctctgttcatatttttgtcttgttcttccaattggtatatacaactttcagagcctcttgtatttggaaggctggaagggcccagactttggaatagtgtcttggtttcactgtttttgttttgattttttttttgttttgattttttttaaactaaagctatataaagcttgtggattaaacagaataaatttctaaatttaaaaattttgccactcttaaaaaaaaaaaaaaaaaaa

SEQ ID NO: 631 - DNA, 1102 bp, Homo sapiens
  ref <308>: DATABASE ACCESSION NUMBER: NCBI / NM_005594
  ref <309>: DATABASE ENTRY DATE: 2011-09-24
  ref <313>: RELEVANT RESIDUES IN SEQ ID NO: (1)..(1102)
ggttccgcgttccctgcacagtaagtactttctgtgccgctactgtctatccgcagccatccgcctttctttcgggctaagccgccccggggactgagagttaaggagagttggaggctttactgggccacagggttcctactcgcccctgggcctccggacaaaatggggtctgcggttggtgtcctggcaaaagcagggtagaagggctgcggggcgggcccagaatccgagcctgcagagatgggagcagttgcagtgttgagggcggaagaggagtgcgtcttgttttgggaactgcttcacaggatccagaaaaggaaatgcccggcgaagccacagaaaccgtccctgctacagagcaggagttgccgcagccccaggctgagacagggtctggaacagaatctgacagtgatgaatcagtaccagagcttgaagaacaggattccacccaggcaaccacacaacaagcccagctggcggcagcagctgaaattgatgaagaaccagtcagtaaagcaaaacagagtcggagtgaaaagaaggcacggaaggctatgtccaaactgggtcttcggcaggttacaggagttactagagtcactatccggaaatctaagaatatcctctttgtcatcacaaaaccagatgtctacaagagccctgcttcagatacttacatagtttttggggaagccaagatcgaagatttatcccagcaagcacaactagcagctgctgagaaattcaaagttcaaggtgaagctgtctcaaacattcaagaaaacacacagactccaactgtacaagaggagagtgaagaggaagaggtcgatgaaacaggtgtagaagttaaggacattgaattggtcatgtcacaagcaaatgtgtcgagagcaaaggcagtccgagccctgaagaacaacagtaatgatattgtaaatgcgattatggaattaacaatgtaaccatatggaagcaactttttttggtgtctcaaaggagtaactgcagcttggtttgaaatttgtactgtttctatcataaataaagttatggcttcttgttggatgaattcaaaaaaaaaaaaaaaaaaaaa

SEQ ID NO: 632 - DNA, 782 bp, Homo sapiens
  ref <308>: DATABASE ACCESSION NUMBER: NCBI / NM_005340
  ref <309>: DATABASE ENTRY DATE: 2011-11-27
  ref <313>: RELEVANT RESIDUES IN SEQ ID NO: (1)..(782)
acgcgcaagattaggtggggcgccagagccggggcacctgcgcaggcttggctgcgccctctcgcgccgcacgctctgcgggttcctcccttcttccgagcctctcctctggccgccgcgcgggagagaggccgagatggcagatgagattgccaaggctcaggtcgctcggcctggtggcgacacgatctttgggaagatcatccgcaaggaaataccagccaaaatcatttttgaggatgaccggtgccttgctttccatgacatttcccctcaagcaccaacacattttctggtgatacccaagaaacatatatcccagatttctgtggcagaagatgatgatgaaagtcttcttggacacttaatgattgttggcaagaaatgtgctgctgatctgggcctgaataagggttatcgaatggtggtgaatgaaggttcagatggtggacagtctgtctatcacgttcatctccatgttcttggaggtcggcaaatgcattggcctcctggttaagcacgttttggggataattttctcttctttaggcaatgattaagttaggcaatttccagtatgttaagtaacacacttatttttgcctgtgtatggagagattcaagaaataattttaaaaccgcatacataataaaagacattgttgcatggcttatagtctctctgagtgttgcgtttgatttgttattttaaaaacatatttgttggaatatgtgaaggtgggtttataattttggatgtttcttgctttttcttcccaagg

SEQ ID NO: 633 - DNA, 663 bp, Homo sapiens
  ref <308>: DATABASE ACCESSION NUMBER: NCBI / NM_005175
  ref <309>: DATABASE ENTRY DATE: 2011-11-20
  ref <313>: RELEVANT RESIDUES IN SEQ ID NO: (1)..(663)
caggacacgtgggtgggggaagctgagcgctgagaccaagggctaaagctgggaggtgagtctgtcaccttgagccgggcgagcgctgtgggccaagcaggggttgcagggtagtaggagtgcagactgaaaaaatgcagaccgccggggcattattcatttctccagctctgatccgctgttgtaccaggggtctaatcaggcctgtgtctgcctccttcttgaatagcccagtgaattcatctaaacagccttcctacagcaacttcccactccaggtggccagacgggagttccagaccagtgttgtctcccgggacattgacacagcagccaagtttattggtgctggggcagccacagttggtgtggctggttcaggggctggcattggaaccgtgtttggcagcttgatcattggctatgccaggaacccgtctctcaagcagcagctcttctcctatgccattcttggctttgccctgtctgaggccatggggcttttctgtttgatggtcgccttcctcatcctcttcgccatgtgaggctccatggggggtcaccggcctgttgctactgcaactccacaccattcttggtgctggggtgtgttaagctttaccattaaacacaacgtttctctaaaaaaaaaaaaaaaaaaaa

SEQ ID NO: 634 - DNA, 1665 bp, Homo sapiens
  ref <308>: DATABASE ACCESSION NUMBER: NCBI / NM_005165
  ref <309>: DATABASE ENTRY DATE: 2011-11-28
  ref <313>: RELEVANT RESIDUES IN SEQ ID NO: (1)..(1665)
ccggaggagtcacgtagctctgcgacatccgcagcctcatttaccagagggagccagggctgcagcctcatctgtttgcggatcagaacccgagctgtgcttgtggctgcggctgctaactggctgcgcacagggagctgtcaccatgcctcactcgtacccagccctttctgctgagcagaagaaggagttgtctgacattgccctgcggattgtagccccgggcaaaggcattctggctgcggatgagtctgtaggcagcatggccaagcggctgagccaaattggggtggaaaacacagaggagaaccgccggctgtaccgccaggtcctgttcagtgctgatgaccgtgtgaaaaagtgcattggaggcgtcattttcttccatgagaccctctaccagaaagatgataatggtgttcccttcgtccgaaccatccaggataagggcatcgtcgtgggcatcaaggttgacaagggtgtggtgcctctagctgggactgatggagaaaccaccactcaagggctggatgggctctcagaacgctgtgcccaatacaagaaggatggtgctgactttgccaagtggcgctgtgtgctgaaaatcagtgagcgtacaccctctgcacttgccattctggagaacgccaacgtgctggcccgttatgccagtatctgccagcagaatggcattgtgcctattgtggaacctgaaatattgcctgatggagaccacgacctcaaacgttgtcagtatgttacagagaaggtcttggctgctgtgtacaaggccctgagtgaccatcatgtatacctggaggggaccctgctcaagcccaacatggtgaccccgggccatgcctgtcccatcaagtataccccagaggagattgccatggcaactgtcactgccctgcgtcgcactgtgcccccagctgtcccaggagtgaccttcctgtctgggggtcagagcgaagaagaggcatcattcaacctcaatgccatcaaccgctgcccccttccccgaccctgggcgcttaccttctcctatgggcgtgccctgcaagcctctgcactcaatgcctggcgagggcaacgggacaatgctggggctgccactgaggagttcatcaagcgggctgaggtgaatgggcttgcagcccagggcaagtatgaaggcagtggagaagatggtggagcagcagcacagtcactctacattgccaaccatgcctactgagtatccactccataccacagcccttggcccagccatctgcacccacttttgcttgtagtcatggccagggccaaatagctatgcagagcagagatgccttcacctggcaccaacttgtcttcctttctctcttcccttcccctctctcattgctgcacctgggaccataggatgggaggatagggagcccctcatgactgagggcagaagaaattgctagaagtcagaacaggatggctgggtctccccctacctcttccagctcccacaattttcccatgatgaggtagcttctccctgggctctccttcttgcctgccctgtctcctgggatcagagggtagtacagaagccctgactcatgccttgagtacataccatacagcaaataaatggtagcaaaacattctaaaaaaaaaaaaaaa

SEQ ID NO: 635 - DNA, 585 bp, Homo sapiens
  ref <308>: DATABASE ACCESSION NUMBER: NCBI / NM_005001
  ref <309>: DATABASE ENTRY DATE: 2011-11-28
  ref <313>: RELEVANT RESIDUES IN SEQ ID NO: (1)..(585)
acgtcaccggctgcgcccttcagtatcgcggacggaagatggcgtccgccacccgtctcatccagcggctgcggaactgggcgtccgggcatgacctgcaggggaagctgcagctacgctaccaggagatctccaagcgaactcagcctcctcccaagctccctgtgggtcctagccacaagctctccaacaattactattgcactcgcgatggccgccgggaatctgtgcccccttccatcatcatgtcgtcgcagaaggcgctggtgtcaggcaagccagcagagagctctgctgtagctgccactgagaagaaggcggtgactccagctcctcccataaagaggtgggagctgtcctcggaccagccttacctgtgacactgcaccctcacggccacccgactactttgcctccttggatttcctccagggagaatgtgacctaatttatgacaaatacgtagagctcaggtatcacttctagttttactttaaaaaataaaaaaatagagacagagtctcaccatgtttcccaggctgatcttgaactcctggcctcaagcgatcctcctgccttgacctc

SEQ ID NO: 636 - DNA, 591 bp, Homo sapiens
  ref <308>: DATABASE ACCESSION NUMBER: GenBank / EF092292
  ref <309>: DATABASE ENTRY DATE: 2007-02-19
  ref <313>: RELEVANT RESIDUES IN SEQ ID NO: (1)..(591)
aacaagtaccagggcttcatattcgacattgtgaccaagcaggcctttgacgtcaccatcatgtttctgatctgcttgaatatggtgaccatgatggtggagacagatgaccaaagtcctgagaaaatcaacatcttggccaagatcaacctgctctttgtggccatcttcacaggcgagtgtattgtcaagctggctgccctgcgccactactacttcaccaacagctggaatatcttcgacttcgtggttgtcatcctctccatcgtgggagccctcctagtgagtatgaagtgatatctcactgaggttttggtttgcaaaagcaaatgactgatgactaacgatgcaggacatctttccatgtgcatgttggtcatttatatatcttccttggagaaatctctattcagatccttagctcatttttaattgggttatttctcttcttcttgttgagttgtaagagttctttacatattctggatcacagtctcttatcagatatatgatttaaaaatattttctcctagtctgtgagttttttcatttcctagtggtgtccattaaagcacaaaagttttacatgtt

SEQ ID NO: 637 - DNA, 434 bp, Homo sapiens
  ref <308>: DATABASE ACCESSION NUMBER: GenBank / EF092293
  ref <309>: DATABASE ENTRY DATE: 2007-02-19
  ref <313>: RELEVANT RESIDUES IN SEQ ID NO: (1)..(434)
aacaagtaccagggcttcatattcgacattgtgaccaagcaggcctttgacgtcaccatcatgtttctgatctgcttgaatatggtgaccatgatggtggagacagatgaccaaagtcctgagaaaatcaacatcttggccaagatcaacctgctctttgtggccatcttcacaggcgagtgtattgtcaagctggctgccctgcgccactactacttcaccaacagctggaatatcttcgacttcgtggttgtcatcctctccatcgtggaactgcacaatgaccagcaggaggggagaagagagtaggaaaaaggagggaaggacagacatcaagtgccagatgttgtctgaactaatcgagcacttctcaccaaacttcatgtataaataaaatacatatttttaaaacaaaccaataaatggcttacatg

SEQ ID NO: 638 - DNA, 384 bp, Homo sapiens
  ref <308>: DATABASE ACCESSION NUMBER: GenBank / EF092294
  ref <309>: DATABASE ENTRY DATE: 2007-02-19
  ref <313>: RELEVANT RESIDUES IN SEQ ID NO: (1)..(384)
aacaagtaccagggcttcatattcgacattgtgaccaagcaggcctttgacgtcaccatcatgtttctgatctgcttgaatatggtgaccatgatggtggagacagatgaccaaagtcctgagaaaatcaacatcttggccaagatcaacctgctctttgtggccatcttcacaggcgagtgtattgtcaagctggctgccctgcgccactactacttcaccaacagctggaatatcttcgacttcgtggttgtcatcctctccatcgtgggcactgtgctctcggacatcatccagaagtacttcttctccccgacgctcttccgagtcatccgcctggcccgaataggccgcatcctcagactgatccgaggggccaagggg

SEQ ID NO: 639 - DNA, 384 bp, Homo sapiens; identical to SEQ ID NO: 638

SEQ ID NO: 640 - DNA, 23 bp, Artificial Sequence
  Synthetic primer
catcttccggttcagtgccacca

SEQ ID NO: 641 - DNA, 24 bp, Artificial Sequence
  Synthetic primer
gctgccctgcgccactactacttc

SEQ ID NO: 642 - DNA, 24 bp, Artificial Sequence
  Synthetic primer
catcccacggcccctgaacaagta

SEQ ID NO: 643 - DNA, 25 bp, Artificial Sequence
  Synthetic primer
ctgcgccactactacttcaccaaca

SEQ ID NO: 644 - DNA, 23 bp, Artificial Sequence
  Synthetic primer
atgcacatggaaagatgtcctgc

SEQ ID NO: 645 - DNA, 25 bp, Artificial Sequence
  Synthetic primer
tcttggcacttgatgtctgtccttc

SEQ ID NO: 646 - DNA, 22 bp, Artificial Sequence
  Synthetic primer
tcatgagggcaaagagcagcgt

SEQ ID NO: 647 - DNA, 24 bp, Artificial Sequence
  Synthetic primer
gctgccctgcgccactattacttc

SEQ ID NO: 648 - DNA, 30 bp, Artificial Sequence
  Synthetic primer
aagaactcgtcaagaaggcgatagaaggcg

SEQ ID NO: 649 - DNA, 30 bp, Artificial Sequence
  Synthetic primer
aggatctcctgtcatctcaccttgctcctg

SEQ ID NO: 650 - DNA, 22 bp, Artificial Sequence
  Synthetic primer
aagcaagctacgtgcctggctg

SEQ ID NO: 651 - DNA, 24 bp, Artificial Sequence
  Synthetic primer
cagagcccatgtatagttgatttc

SEQ ID NO: 652 - DNA, 18 bp, Artificial Sequence
  Synthetic primer
gctgttggcaaaggtctg

SEQ ID NO: 653 - DNA, 20 bp, Artificial Sequence
  Synthetic primer
gaagaagctgggctccaaga

SEQ ID NO: 654 - DNA, 20 bp, Artificial Sequence
  Synthetic primer
catcgaaggcctgcttggtc

SEQ ID NO: 655 - DNA, 34 bp, Artificial Sequence
  Synthetic primer
ggtgctgcactcaggccatccctatgagatcctc

SEQ ID NO: 656 - DNA, 34 bp, Artificial Sequence
  Synthetic primer
gaggatctcatagggatggcctgagtgcagcacc

SEQ ID NO: 657 - DNA, 34 bp, Artificial Sequence
  Synthetic primer
ggtgctgcactcaggggatccctatgagatcctc

SEQ ID NO: 658 - DNA, 34 bp, Artificial Sequence; identical to SEQ ID NO: 655
  Synthetic primer
